United States Patent Application Publication US 2022/0167576 A1 - sequence listing, part 4

SEQ ID NO: 30 - DNA, 35937250 bp, Oryza sativa (residues 6,341,869-8,455,824 of 35,937,250)
  misc_feature (5969519)..(5970518): n is a, c, g, or t
  misc_feature (13681864)..(13682863): n is a, c, g, or t
  misc_feature (13684155)..(13684254): n is a, c, g, or t
  misc_feature (18795366)..(18796365): n is a, c, g, or t
  misc_feature (24815509)..(24816508): n is a, c, g, or t
  misc_feature (35936251)..(35937250): n is a, c, g, or t
tatttagtttctaatgaatccgttgcaacgggcatattttctagtcctattaaagcaacggtcatatattttctagtccacataaaaaaagaaaaaaaccttttcctctctctcaatctcctcttaaagcaacggtcatattttctttctagtcctcataaaaaaagaaagaaaaaacctttccttctctctcactctcctctcaaagcaacggtcatattttctcccgtaaaaaaaacggtcatattttctccggtcaaaaaaaagaaagaaaaaaccttttcctctctctcactctcctctcaaagcaacggtcatattttctcccgtcaaaaaaaaaaaacggtaatattttctcccgtcaaaaaaaagaaagaaaaaaccttttcctctctctcactctcctctcctcctcgcgccgcgaatcctagcgaagcggaggcggccaccacctggccctgcgccggcgccgccgcggcggcggcggcggcggcggcggcggagtcctcccctcctctctccctcttcccgcggtgggattcctgcaaatctatatgcatttgatcagcaatggtggttctagcagctaggtgaggatctattcctaaatcctaaccctcccaccatgttcgtgaaagggtttttgggaaatgagcgtttaggatggtcgaattggagtacttgatttggctctggtagaaaaccctagaaagtttgcttccaaatttgctcttattttttcttgtgtgcgtgcgtgtgcgcatgtggcagaggaaatttaggaggttggatgtacccagatttggtattttctggtgctttacctacatcggtaccaaagttttaatcccaattttgaggccttcaggtgttgtggtatgctaggagcttaataaggtatctccatgtaacaggaatcatgtatatgtggaatcatttgcatactgctctagcttttatgggtcgatttaggttctttggagtagatttgaatatttgatagagtaatgtttctcttcttaaaattgtgggttcttcattgacttgattctctgccatgttagctactatttttaagtggatcagtgtgctggcctcatttgatgctctcaaagtgaatgaataatacatcagatagtactaaagtcatgggcattggattggttgaagaaaataggattgtttctatgtcagagtacaaggttgcatcaattgtggtgctgtactaatatcgagtagaaggggcttcgatagccatcatcagtcatgtgcttccaaaatggatatttcataatcttgaattctaaattgaaaattggaagtaccttatcgaaatgttaattggtcatgccatcatagttccacagtgtttcttattatccttcttgtgcctgtgatgagactttgttctgttcattaatgccggtggctgtgcaattgagggttgtgaaccctcttcaaagctttctgacgaatctttcttcgaaggaggggatgcaatattgacatctgaggatatagtttgaagtggtgactatcctttgctttaccactcagttcgatatggaaattccagctagaaaatcgatggtcttgctcctggagactttctttgatctgcatttgctgagatagtgaacacttacgggccaaaaggaattagagcatttgatgtccttgtgcaagaagaaaatgcaaacacagtattcatgagactcttaattttgtatcacaatttattttcaggtttagctaaacaatttgacttttgattgatgcacagattttgtctgaatttgatgtgtatgcagtggttggactggtaacagaccccttcatatgcgtgatattagggtgacagttgagagtaacggcacctttgtcataaacttcaaaggagtaaggggaagtcccatggtttgtgccatttgtattcgaaaacggtagcaatagcaggtaagacacaatatattagattcaacttactccttcaaggtctaattttcagataagatgtttctgtatgctcaccactgttttacgttcctgacagaacaagtccttgatagacaagctgatcaactgagaagtgtttcccaaaagtatgataatgccaataaattatgggcagctgccatatctaacttggaaaataaaatcaaggtaaaagcagatttactgaattgataaatacattaggtgctatgttttactgattatatcactttgtaattttcaggtcatgaaacaagagcaaacaatgctatctcttgaagcacatggccatgcaaacgctgttcctgaactgagtaagatggtaggggctgttcaagcattaggtaatatccatcagttgcattattgtaaaggttttagagtatttgatgaaaaagtttgtaaaaattttgttttttttgctgcagttgtgcagtgtgaagatcttaaactgaagtactatgaagagatggccaagagaaagaaacttcataatattgttgggagaccaaaggtgcctcttctgatcttctcctccgtattatgatgctttcacttagtaccatgaatgttggtcgtcatgtagtgccgacagtttccacgtgctcgcattgtgctaatagatattttcagtgatgaactcagaacaaaaaataccaagagtccaatacatacgaattatgtaactatttaccggtatagtagttaacatggcgtactttagctagaatttaataatttagccagggtcccaaaggatccctggaaacataacataggcacgccgcttgatacttctacgcttaactctgtagttttttctcatattgcagtgtggttttgttttatagttttgctcgggcttaattgaaacataattagtcagcttgctcaactccatgttcgtccctaggttcaggactgcagggagcttttgtaccgttcaactccacgaatatgggctgctcgcatggtcttcctgtgctggcgagggcatcggctggtactgcaggcttggccgctgcaaggggtgccggcgccgtcggcagggcccagctgtccctgctcccaagggacgaccatgactgttgcagccatagtggtgcccacgctttgcaaggcagtgaatgtgaattaacgacatggtcagccacaaagcaggtctgcttggggattgccagattagcaagatcagtttcattggtaacttcttgcagcccctcctctacatcttcttgttttccaatccattttagtgtcttggcatattgttttactgtgttgttttttatgagctctgctactgttgtatgaaactagactactagagtcactgagtcagcaaccaagcagcacatcatcttagctttttgaggaacttgagtctgtctagatagtaaaaatcaaatattttggtaattgatctgtactaggttaaaggttaactattttttcatgtcgaaggtttttcatttcaagcgcacatatagaagatggagttcttaatgtcctgcaataattctgaccattatccatataccagtgctggctattattttgacgatgtcgtatatgtgctctgctattcataatgtgaaatacaaattaagttattgcagggtttgcactttttatcttggtgcgaattttggtaggaccaaaatttatgaatttttttgattttcagaactttttggactgattttttttagaatttgaataaactttgagaaatttcaacaaagaattgagaaaatctgccgaaatttcgaactgagcattcagaaatttctgaaattttgaaccgaaattgcaatcactgggttattgtcataatgtgataccacattcttaattgcacatgatacgaaggatagggagtgggctttatatcactgttgattcataatatttctatccatgtatatattattgccaagtttactgtgaaatagaaaaccatattctacttcagagtaaagaggggtatttcctcttcaaattagtcattccaaaattgttggtgttctatttcatgctaacttgttttttatgttcataattaattaattccataaataaatctttgataaaattttttttatgttctatttgatgctagccaaatttacacagtttaattttggctgcatcaataaatcttttacttgttaccagcatcattggcaaattgatggatgattacattataatatagattatttacattagtggatagttcatctcgttatcgcacctgcagaatttgtttgatacaatgaaatgaacaaggatgtgaactacagctggtatactgattgctaagagaaatgcttgtaacaacatgtataatatttaggattctcagtaaatacctgaccacaacctgtactgactatatttttcaacctgtggccgcctcgcagatctgttccacccggagaaatgcttgtaacatgtatattatttaggtttctcagtaaatacatgaccacaacctgtactgactataattttcaacctgtggccgcctcgccgatctgttccacccggccccaaaggtggaggtctgtcacctggtgcacttcgtcatcggatcttcctcctcaactccgtcatgtgcagatccagcgcacggtgcgtcaccgttgtgaatgtcaaaccggttcaccttgcgatcatccaccggcttcctcgacgtcgtccttgaaagcgaccctgtgcaggtttgccgaatgcactcccggtgtcctctccctcttgtgccattatgtgcaatttttgtgctgcatttcgtgctgaatccgtgcaaagaaaaaggcttaatagttatcattttgttccattttttgaatggttttcagtttttcacatggattatgctctgctctgtttcgtttatgaaagatgcttatctcaatttacactaatctcttttactcggtgtatgcatatatttattctagcctgctagatgtatattgctagcgttcagaaagtatccacgaatgcttttattcatctaaatataattgttcatatgtttttaggagctactggtttatctcatgaaatggtccgaataacacttgacgtgtaaaaagatcagaatgtgttatatattatcgttttttgatttcaccaaagtgttttttttttggattacccacaaagagttattttttatttcacatttctactatatttatcataaagtttctcttttcttttctgtgccttctaggcaaacatctttcgctgaaaacttcagcaaaggagcagttgaagaataagtgattgccatcttcgtcttgatgcaagcagattccgtatgcacaatgttcttcatgagcaaatttgtcattgttggtagtcgatttttgaagataagccaggcaaaaattgttgcactcagaggggggctgaattcttctacacaaattcccagattggacaaggggcagaagcagaggtattgatctgatcatatagaggcagagccttccatgtgagagcttgagtgcaaccagcaggcggactgtactgtcatctatcttcttcgtcatcgaggtgcactgcattggtgacatcaggtcatgggaggtgagaaacaagttttggcatgcgacactatgttggtcataggaaataaaacacaatatgagaagatcatacaacggcctgcttttccagtttgcagaaactgtgatggtttcaggatttcttgttcttttgtgaagtttaggggttgaggagagtattttgagattggacttcgtttaactatttttttcctttcacctttgtctgttcatttatttaactttatttctttgcagtggcgagatgagactgtgtactagagatgcctactttgtagatatcttgagacagtgcaggtacatccaatgctcacttcactaattcaatatatgtaaattatgtaaattactggcttatttattttcagtttgattgctgtgcatgtatatcctatagaaatccatttctttatattctattttaaggaacagtacactttcatgaaaatcgtaaaatcgtagtttgcttgtccagaacgttttattggtttttccgttgacgcttcatttttcatcaataagtttatgtttttttacttttagttggattcctttactttcaaacgttcttcttgcatcgattcttcaaatatcctttttggagtttccatatttttcggttatcaccgttcgtcttccttaagttggtttgaactttgatatctggtatataaaaactttacttttgtttctcgcgtgacggttgtattttcataattgagtttcaacttggtacttttagttggatttcttcaatcataaagttttatcttttcccaacttctctttggacttcaaagctttattttagttttgaaatctccattacctaaattttgtataaacttttggttactatttgtgaaaagaaaatagttgcttgcatttaaaccttgcggcttttttgtgctctgacatttagacttataacaaagttctagagttacgtttccctatttatcgaaaaaatattttggttgcgggcaagttatctacatttggttgcatccttttgattttatgaaaaccttagtttgcttgtaccgaacgatttattggattctccgttgacgctttatttttcatccacaagtttaaattttatacttttagttggatttctagattttgtaacgttcttcttgcatcgattcttcaaatatcctttttagagcttccgtgataaacgttttattggtttatccgtgttggagcttccaattttttttggttgtcgcggttcgtctttctaaagtttgtttgaactttattttctggtttaataaaaaaatattcattttgcattgaggcctaatcgtttaattttgctttgacgttaattttgaagttataattgagttatatagttgggtctccctctttattgaaaacatataactttgttgtgagctcgattgatgctttttttttttgcaccttgaagcttttatgaaaatcgcagtttccatgtgacaaacgtttctatgtttttcgcttgacgcttctctttccgtccttttgtttaaacattatggtttcagctggatttctttattttagaatgttactctttattcatgctttttacatgctatttggacttaatttattttggtttctcgagtggcggtagttttttcacccttgaatttccacttggtactatctttttggaacttctctttggactttaaaactttattttagttctgaaatctcaatttcctaaattttatatgtacttatgcttactagtttgtgaaaagattgcttgcatttaaaccttgcggtatttttgtgctctgacgttttaatcgtagacttgtaactaagttctagagttacgtttccctgtttatcgaaaaaatatcttggttgcgagtgaaacaactacatttggtcgcatccttttggttttatgagaaccgtagtttgcttgtgccgaacgatttaatggattctccgttgacgctttatttttcatccataagtttaaattttgcacttttagttggattccttgattttgtaacgttcttcttgcatcgattcttcaaatatcctttttggggttaccaattctttttgttgtcacggttcgtcttccttatgtttgtttgaactttgttttttggtttataaaaacaaaatattcttttcattgaaggccgaccgttttattttgctctaacgttgattttgaactaattaattgagttgtagaggttcgtattcctgtttattgaaaacaaataactttgttgtaaagtggacccatgcattttgttgcaccttaaagcttttttgaaaatcgcgatttccttgtattgatcgttttcacgtttcaatgttccgtcctttcattcgaactgaacgcttttagttggtttctttattttcgaactttctctcgtattgatgcttttgatgttctctttggacactaaatctttaatttagttttgaaatatcagatttcctaaatttttatttgaacttgctagtttgtgaaaagaaaatatttgcttgcatttaaatcttgggctttttttgtgctctaccagtataagttttgacttataacaaagttctagagttacgtttccctgtttatcgaaaaaatatcttggttgcgggcaagttgtctacatttggttgtatccttttgattttatgaaaaccgtagtttgcttgtaccgaacgatttattggattctccgttgacgcgttattttcatccataagtttaaattttgtacttttagttggatttcttgattttgtaacgttcttcttgcattgattcttcaaatatccttgttggagtttccaattttttatggttgtcgcggttcgtgtacccaaattttttttgaactttgttttctggtttaataaaacaaaatattcgttttgcattgaggcctaactgtttaattttgctcagacgttaattttgaagttataattgagttgtatagttgagtctccctctttattgaaaacaaataactttgttgtgagttggatcgatgcatttttctgcaccttgaagcttttatgaatatcgtcgtttacatttggttgcatcttattgatttcttcaaatatcctttttggggttaccaattctttttgttgtcatggttcgtcttccttatgtttgtttgaactttgttttttgtttataaaaaccaaatattcttttgtattgaagcctgaccgttttattttgctctaacgttgattttgaacttattaattgagttgtagaggtccgtcttcctgtttattgagaacaaataacttagttgtaaagtggacccatgcattttgttgcaccttgaagcttttttgaaaatcgcaatttccttgtattgatcgttttcacgtttcaatgttccgtcctttcatttgaactgaacgcttttagttggatttctttattttcgaactttctcttgtattaatgctttttatgttctctttggacattaaatctttaatttagttttgaaatatcagatttcctaaattttgtttgaacttactagtttgtgaaaagaaaatatttgcttgcatttaaatcttgggttttttttttgtgctctaccagtttcattttcgacttataactaagttgtagagttacgtctccctgtttatccaaaaaatatgttggttgcgggctagaggtctacatttggttgcatccttttgattttatgaaaccgtagtttgcttgtttcgaaagatttattggcttctccgttgacgctttatttttcgtccataagtttaaattttatacttttagttggattccttgatttggtagcgttcttcttgcattgattccacacatatcctttttgagtttccaattttattcggttgtcacggttcatattccgtaggacacatatcctttttggagtttctagtttttttcggttgtcacggttcgtattccttaggtttttttgaactttgttttctggtttataaaaacaaaatgttcttttgcattaaggcctaactgatttattttgttcttataattgagttgtagagttcggtctcaattagtgtgcataaccgtgttctgaaatctgtagacagcggtgttcatctttttatgtagtccaaactataaaagatagtcatgctatcttttaacagtagcttgcagacatacccagtagactccatgaatttaggctaaattttttgtcttcgcatcatggtctaaaaattcataaaacactgcttagtcccaacctgaaaacaataagtaaactcgttgtcgaatttgtgtagcccaatctagaagggatagaatcttggttccttcagagtagctcaaaaccttacccatcattctctctgatttaattttctaattttttttgaacctttagatcttgacctaaaaattcggtaaacatagtagaccggtaaattccagcattgcatcacttatcttgaccaatttctttaaattaatctaattgtccagaaatcaccattccttcccagatcggaaaaaaaaatctttgttaggatcatgaatataatttttttctaatttatcacccatctaacatagtgtcttgcttcagtttgcgcctcaggacttgataggacagcatatggcacatagacctatttagctcttccattaaaatttctagataaactccatttaaaaattttattttattttaaaccgaaagacaaaacatgtaacctttgcaagccacacaagcctaaatggaaatatcatactaggagtaagtcataagcaaactatgtaatttaagttgagatggctcagtgggcaaattttgtgcccctttacggtcggatgcaagatttgtacattgcagcaactcacaaacatggtttgggaacttgacttgtaggttttgaaaacttcttgaagatgatccatttgttttaaaattaccatctttttccaggataagttgaactttgttacgagtctgagttaatttttttttaattttatcaccttatcctagcctatagcctataaagagttgcaacccttcccatgcccatgaaaaaccttgagtaggatcaatagtctcaagaacaattttcccgaaaggattattctatgtttgcgaagagtattcatgcttctgacatgctatttggactttaaaagtttactttggattctcacgtgacggttcctttttcattcgtgagaaacttggtattttcagtctgatttcttcggttacaaagtctctttttcgatcttctctttggctctagagctttaattttgtactgagacgtcaatttcctaaattttgtgcgaatttatgctttcttgtttgtgaaagaaaatatttgcttgcttttaaaccttgtgactttattgtgctctgacgttttagttttggatttaaaagtgaaaagatatcttggttgtgggctagacgttacatttggttgcatctttttgattttgttaaaatcgttgtttggttgtaccaaacgatttcgtggtttctctgctgaggcttcatttttaatccaaaacttttttttgagctagacccttgcattttgttgcacatctatgtcttaatgaaaatcacggtttcgttgtatcaaacatttcttgttttctctcgatgcttcattttccatcatttcgtttaaaccatatgcttttcgttggatttctttattttcgaaagttctattgtattaatgcttttgacatgctatttggactttcaaactttaaatttgaacttataattgagttgtagagttggatctccctctttattgaaaacaaataactttgttttgagctggaccgatgcattttttttgcaccttgaagcttttatgaaaatagcagtttccatgtgaaacgtttctaggtttttcccttgacgcttctcttttcgtccttttgttaaaactatatggtttcaactggatttctttattttcgaatgttctcttgtattcatgcttttgacaagctatttggaccttaaaatttttgtttggtttctagcgtgatggttttttttccttgagattcaatttgttactttcaattttattttttcagttacaaagtatatatttttcggtcttctctttggactttaaagctttaattaagttctgaaatgacaatttcctaaattttgtttgaatgtatgctaactagtttgtgaaaaggaaatatttgcttgtttttaaaccttgtgtctttgtgctttgacgtttttatcataaacttatatctagtttctatatctagtttctagagttgcatttccctgtttatcaaaaaaaatatttgttgcaggctagacatctagatttggttgcatcttattggtttctagagttgcgtttcccttttttttgctctggcatttagacttataacaacgttctagagttacatttccctgtttatcgaaaaaatatcttggttgcgggcaagtagtctacattgggttgcatccttttgattttatgaaaaccgtagtttgcttgtacagaacgatttattggattctccgttgatgctttattcttcatccataagattaaattttgtacttttagttggattccttgattttgtaacattcttcttgcatcaattcgtcaaatatccttgttggagtttccaattttttacggttgtaacggttcgtcttcctaatgtttgtttgaactttgttttctggtttaatgaaacaaaatattcattttgcattgaggcctaaccgttttattttgctccgatgttaattttgaagttataattgagttgtatagttgggtccgcctctttattgaaaacagataactttgttgtcagcgggattgatgcttttttttttttgcaccttgaagcttttattaaaatcacagtttacatttggttgcatctgattgatttcttgaaaatcgtagtttgcttgtcccgaacgatttattggtttctccgtttctgaaagaaaatatttgcttgcatttaaaccttgtctttattgtgctctgacgctttaattttggatttataactgaaaaaatatcttgttgcgagctagacgttacatttggttgcatcttattggttgcgggctagaccggtaaattccagcactgcatcacttatcttgaccaaaatctttaaaataatccatttgtccaaaaaatcaccattccttcccagattggaaaaaaactttgttaggatcatgaatataatttttttctaatttataacccatctaacagtcttttgcttcagtttgcgcgtcgggactagataggacagcatctggcggactggcacatagacctatttagctcttcctttaaaatttgttgataaacaccattgcaaaattttattttattttaagggggatagaataccatgaccttacaaacccagagacaacatgtaacctttgcaagcctcacaagcctaaatggaaatatcctactaggaacaagtcataagcaaactatgtaagttaagttgagatggctcagtgtgtaaattttgtgcccctttacggtcggatgcaagatttgtacattgcagcaactcacaaacatggtttgggaacttgacttgtaggttttgaaaacttctctaagatgatccatttgttttaaaattgccatctttttcaagataagaaaagccttgtgatgagtttgagttaagaaaatgtttaattttgtcagcttgtcctagtctgtagcctataaagagttgcaacccttcccatgcccatgaaaaaccttgagtaggatcaatagtctcaagaacaattttcccgataggattgttctatggcatgtatgcaatacaaaatatcttcataatcattgtatcatttcatacatgcatcgcctcatttcgttcatcatgatatcatagcatacatccttgtcttttttgagcaaaagaaaagttattgctatatatgccatctagcaacccattttctaccacgacccaagtatatggatgcaaataatgagaccgtcctgatgcatgcaagtatgactcgacaaatattcctagaacaccttggattagattgcatatgactaattatcacttggagaacaaatatttccaacccctaagatgtaacccaaagttttgttcagtttatccatatttccccaatggccttacttgttgtcttaaaacttaaatttatcgaatgtgagatcaacaaggttagatcatgaccgtagaccatgaagacatgaaccttgttacatcctaacggttagagatactaaatctggtattcttgaaaagttttataaacatttaaaattaataatgttgtattgttattagaaaacaacattgccgtgacaccttagatcatattccaccaaccaaacaaggataggttctcataccaccctctccaaagacaaaaatcattgtaagaaccacataaataatatgaattcctaagtaggctgacccatattcgacaacacttccatccacgacccgacacaaatctcagggacgagatttattttaagggggatagactgttacatacccgaactttaggatttaaaatttcttgtcaaaatagttggaagaaaattaatctatttttgtgaacctcaaatatttattttgaagcaaggcgaagacaattcgacctttgcatatagagaatttaagggcaaattaaaacattttcctttccaacccaaaatgaaaaattttgagtaacttagtgtgaccatacatatacgtatagggcatggttacgtttgagttcttttatgcatgttgggtatgaaactaagtttaacgatatcacctcaggtcaagaagtgctcaaatataaattttataaatactcaaatacatttctataaataaaaacacattgattttatgaaaaatatcttggttgtaggctagagttacatttgtttacatcttattgattttattaaaattgttgtctggttgtaacaaacgatttattggtttctctgttgaggctattgtgtacttttagttggatttcttgactttgaaatgtccttcttgcatcgattcttcaaatatcaattttggagtttccaattatttcgactgtcacaatttgtcttaagtttgtttgaactttgatatctggtttatgaaaacgaaatattctttacccttcaagaccaaccattttattttattctgacattaattttgagcttatatttgagttgtagagttgggtctcctgtgtattgaaaacaaacaactttgttgtgagctggaccccatgtattttgttgcatcttgaagcttttatgaaaatctcggtttctttgtttcaaacgtttctaggtttcagccttgacgctacatttccgtcttctcatgtaaactttatgctttccgttagattactttattttcaaacgttctgctagttggaatttaaatcttaacttttgtttctcgcataacgggttttttaatcaataagtttcaacttggtacattaagtttgatttctacaattactaactttctcttttttcacttatttttgactttaaagctttattttagttctgaaatctcaatttcctaaattttgtatgaacttgtgtttactagtttgtgaaaagaaaatagttgcttgcatttgaccttgaggctgttttgtgctctggtgttttagtagtagacttataactaatttaatttctagagttatatttccctgtttatcgaaaaaatatcttgattttatgatgactgtagtttgcttgttccaaacgatttatttgtttcttcgttgacgcttcatttttcatccataagtttaaattttgtacttttagttggatttctttattttgtaacgttctttttgcaacgattgttcaaatatcctttttggagtttccattttttttgttgtcacggttcgtcttcctgaagtttgtttgaagtttgttttctggtttaataaaacaaaactattcattttgcattgatgcctaagcattttattttgctccgacgttaattttgatcatatgattgagttgtagagttgggtttccctgtttgttgaaaacaagtaacgtttcatgagatggacccatgcattttgctgcacatataagcctttataaaatcttggcttccttgtaccaaacatttctagttttctaacatttctagttttctcccttgacacttcattttccatcctttcgtttaaaccttatgctttttgttggatttctttattttcgacatttctcttgtattaatgcttttgacatgctatttggactttaaaactttattttggtttctcgagtgactgttgttttttcactcttgaatttcaacttggtactctctttttggaaattctatttggactttaaaactttattttagttatgaaatctcaatttcctaaattttgtatgtacttatgcttactagttcgtgaaaagattgtattttgttttctggtttgaaaaagcaaaatattcttttgcattaaggcctaactaatttattttgctcttataattgagttgtagagttgtgtctccctgtttatcaaaaacaaataactttgttgtgagttgggcctatgcatttggttgcaccttgaagtttttatgaaaatcaagctttccttgtatccattggactttaaaacttttgtttccggcgtaatggtttttttcaacattaagtttcaactcggtactttaagtttggtttcttcgattacaaagtttctctttttgatcttcttttggagtttaaagctttatttttagttttgaattataaattaccaaaattttgtttgaactatgcgtacttgtttgtgaaaagaaaatagttgcttgtagttaaacgttgcgggttctttgtgctctgacgtttagatttataactaagtcaagagttatgtttccctgtttatcgaaaaaatgtcttggtttgcagcctactgatattatgaaaaccgtggtttgcttgtttcgaacgatttattggttctccgacgatgctttatttgaaatccataagtttaaattttgtacttttagttggattccttcattttgtaacattcttcttgcattgattctgtaaatatccttttggttgtcacggtccgtcttccttaagtttgtttgaactttgttttctggtttataaaattagaatattcttttgcattaaggcctagctgatttattttgctctaacattaattgtgcacttgtaaatgagttgtagagttgggtcaccatgtttattgaaaacaaataactttgttgtgagctaggcccatatattttgttgcaccttgaagcttctatgaaaataaggtttccttgtatcaaacatttttaggtttctgacttaacgcttcattttctgtcctttcgtttaaaccttatgcatttagttggatttctttattttcgaacgttatcttgtattaatgctttttacatgctatttggtctaaactacttcattttgctttttacatccttgagtttcaatttagtactttttgtttgatttcttcaattacaaagtttctcttttttgatattatctttggactttaaatcattattttagttctgaaatctttatttcttgatatatcctttttggagtttccaattttttcggttatcatcgttcgtcttccttaagtttgtttgaactttgctttctagtttatgaaaacaaaatattcttttgcattgtagccgactgctttattttgtccagacgttaatcttgatcctataattgagttgtagagttgggtctccctttttactgaaaaagaaataagtttattgtgagttggatgcatgcattttgttacaccttgaagattttatgaaaatcgcggtttccttgtatcaaacgtttgtaggtttctctcttgacggttcatttttcatcttctcgtttaaactttatgttttaggtggatttctttaccttcgaacgttctcctctattgatgcttttgacatgctatttggacttcaaaacattatttttgtttctcgagtgacggttgttttttcatccttgaatttcaacttggtacttttatttcgatttcttttgttacaaagtttttctttttcgattttctatttggactttaaagctttagtttagttctgaaatgttaatttcctaaattttgttcgaacctatgcttagttgtttgttaaaataaatattttcttgcatttaaacattgcgtctttattgtgctccgacgttttaattttgctattataattgagttgtagagttgggtctccatgtttatcaaaaacaaataactttgttgtgagcctggcccatgcattttgttgcacgttgaagcttttatgaaaatcatggtttccttgtatcgaacatttctaggtttctccctggaggattcattttcaatcctttcatttaaaccttatgcatttagttggatttatttattttcgaacgttctcttgtatcaatgcttttgacatgctatttggtctttaaaagtttggtttattgagtgacggttgttttttcagccttgtgtttcaatttagtacttttagtttgatttcttcaattacaaagttttttttttatcttctctttggtctttaaatatttattttagttctgaaatctcaattttctaaattttgtttgaactgatgcttaataatttttaacaagaacatatttgtgtgcatttgaaccttgcggctttttttgtgctctaacgttttaattttggccttataattaaattctagagttacgtctcctttttcatcgaaaaaaaatatatattggttgcgaggtggacgtctaaattcgctcgcaacttattgattttatgaaaatcgtagttttgtcgtaccaaacgatttcttggttctctgttgaggcttcatttttcatcaagaaatttatattttgtacttttaattggattccttaattttgaaacattcttcttgcatcaattcttcaaatatccttcttggagtttccaattatttttgttgtcacggttcatcttccttaagttcgtttgaactttgttttctggtttataaaaacaaaatattcttttgcatttttccctaactgatttattttgctcagacattagtgttgaacttttaattgagttgtaaagttgagtctccgtgtttattgaaaacaaataactttgttgtgagctggacccttgtagtttgttgcacgttcaatcttttcggaaaatcacagtttccttgtatcaaacgtttctagatttctcccttaacgctttattttccgtcctttcatttaaactttaagcttttagttagattgctttatttttttaatgttctcttgtatacatggttttgacatgcaatttggactttaaaactttactttggtttattgtgtgatggttcttttatcattcttaagtttcaactcggtacttcgagtttgatttcttcaattacaaagtctctctttttgcaacttctctttagactttaagctttactttagttcagaaatctcaatttgctaaattttgtatgaacttatgcttactagtttgtgaaaaaaaaattagttgcttgcatttaaaccttgcggcttttttctgctctgccattttaatagtagacttataactaatttaatttctagagttatgtttccctgattatcgagaaaaatatcttggttgatggataggcgtctatatttggtggcatcttattgattttgtaaaaatagtagtttgcttgtccctaacgatttattagtttcgtcgttgatgcttcattttttatccataaatttaaattttgtacttttagttggattcctttattttcaaacgttcttcttgcatggattctttaaatatcctttttggattagaattattataatctagattattagtaataatctaaaataaacaggtagattattatgattgattataataatctataagcctgattagtataatctgttaatctcctctaaacgtgcttttttcaaattgttgggtggctagagactcactacccttattataccataatccacatgaacatacaactcatagcttattcgactatagcttattataattcagcttttattaatctggctcaataatctggattacaacaatcttaagttgaaacaaccgaggcctaagtttatttgaactttgatatctgttatatgaaaactttatttttgtttcttgcatgacgtttgttttttcattattgaatttcaactctaaagtttctctttttggaacttctctttggactttaaagatttattttagttctcaagtctccatttcctaaattttgtatgaacttatgttactagtttgtgaaaagaaaatagttgcttgcatttaaaccttgcggcttttttgtgctcggatgtttagacttataactaagttctagagttaagtttccctgtgtattgaaaaaatctcttggttttgggctagatggctacatttggttgcatcctattgattttatgaaaaccatagtttgcttgttataaatgatttattggtttctctgttgacgcttcgttttcatccataagtttaaattttgtacttttagttggatttcttgattttgtaacgttcttcttgcatcgattcttcaaatatcctttttcgaattttcaatttatttttgttattacggtttgtcatcgtaaagtatgtttgaactttgttttctagtttataaaaacaaaatattctttttgcattgaggattaactgttttattttgctctgaagttaattttgaacttattaattgagttgtagaggtctatcttcttgtttattaaaaacaaataactttgttgtgaactggacccatgcattatgttgcaccttgaagcttttatgaaaatcgcgatttcttaggtttgtccattcacgctttgtgttccgccctttcattcgaactaaaccttttagtttgagttctttattttcgaactttctcttgtatcaattgttttgatgttctctttggactttaaagctttaatttagatttgaaatatcaatttcctaaattttgtttgtacatatgattactagtttgtgaaaagaaaatatatgcttgaatttaaaccttgggctttttttgtgctctaacatttttattttcgacttataactaagctctagagttacgtctccgtctttatccaaaaaaaatatgttggttgcgggctagatgtctctatttggttgcatcttattgattttatggaaatcaaagtttacttgtcccgaacgatttattggtttctccgttgacgcttcatttttaatccatatatttaaaatttgtactttaagttggattccttgattttgaaatgtttcttgcatcaattcttcaaatatcatttttaaggtttccaatttttttttggttgtcacggtttgtgttcgttaagtttgtttgaactttgttttctcgtttataaaaacaaaatattctttagcattagggccttatcgatttattttgctctgacgttaattttgaacttataattgagttgtagagttgggtatccctgtttatcgaaaacaaatcggaaaacttaagctacgcagctggggcagccactcacgcgtgccatgtcggattgctacagtgcgcacggtggaatttagctataaagtcctccggtttctacgtaattcgatctgaggactgaggtattattttacataggtgcccttagaaaatatggatattgcatgcgaagaagagaaaaatcgcggattagggctgcgctctaaaatgtggaagccgagcggctttttggcaaaaggacaatcactaacccgaaccatgccccaacccctagcctctgaaagcgcatagaagtcaacgcgataatagattgatcacggacaagatgtcacgggtgaggagattggaagggggattgcagcgaagagagtatttgaacgcagttgttgggcgtgaccctggacctcgtcgacacggcggagccgttttcggcaccacaccagctgtaacaccccaagtaaccacgtacctagagtgccacatcaagaaacactcaaaccactaacttccaaaattattagaaatttcggcagtctcccctgtaaatacggacatccacgacatgcaattataagttaaactaataacaatatcattcccacaatacgacccatccttataatccatggggaagaaactactagaaatctaaaagattattacaagaccaaactaggatataatttaagtgtcattatggacctaagcaatatagtttgatagggtgcgagtagatgtggatataagggtgctacttcccgcccatgcatgtcggtgtaaatgcgtacctaaaaccaaataaaacacaagtgagtataaaaatactcagcaagtacaatatggaactagaaaacacatatacacatcattgacaataaagcatgaacagaaggatttctttctttgataggaaacacatttccaaacaccaagtcaaagaatataatagttcccatcccgggcaggcatgaattgaaatagtagtttccatctcggacaatagtgaatacatcctagcatttgccggcaaagccgagtaagcgtgatcagcgcttacccacaggaacatgaataaagatccaaattgaattcccatgactacgcatggtccttgaataattgaaaaccagaatcaaagaaccaaattgaaaccatattgcacatccatggcaagcatggtacttgaattatttaactagatccagaatacaaaatattgaaacaagaataacatcgtaaacataagatgaactcaaaatgtaaatagcgtgaacaataatctgaacattagtcacttatcacatagaaatatatcagaaataaatagatagagtaaacaatccatgaatcacacaattagttcgtcatgcacttgcctccaacgaaggattagtatcatgcacgatctggtggaccaccacctaatcacaaacaaaacctcagcaaacacattcaaacatgtgtataaaacaatgaaaaaggtgaacctactgcgccatcctatcaaaactcaataacaaggaacgccgcttggactatacacaagactgctgcttcaaacctttatatcttgaaatatgaaaaggctatgactgaaaatgtatacattttgaaaatctacagaacaatacctacaactttgatgtagaaagcatatttttattctgccatttaaatggtctaatttgcacttgaaagcaggcttccgaatctgtccagaatttcagactgtccacactaaaacaaccataactggagttctactcgcccaatcagggtgtactttaccaatatggaaagctaagaaaaaacttctacaactttgtctataggcggcctggctgattccactgtttaacccctccaaaaacagttcaatctactactatccagattatgacacaaaaacaacagtcatactaaaaaaaattatatctcctaaaccacttgagataaaatcgcgccctttggtcagaagatagatccaaacattatctaaaattcctagttatacactttcgcagaaaataacatttagagccccgaaacattgaaacgctgaagcactgcaaatctgcccacatgcagaactgcaacaaaccgaaccacaactacccaaactccttctctagccttccctaaccacgaattaaagcactaaagccatgctagaacaactgatacaacaaggggataagcctcacctagggtttctttagagaacttgtgaggagacaataagggagactccggtctaacccctccttctactcctctcctcctcctcgttccgtttttctacttcgcttcttgttccaagctatgaaggtggagatttagggagagcaatttgttgtagagggaagagatgcgaacacaggaggaggggagtagaaggtgccggccagggagaggggtgacggcactatgaggggaggtgggattcggttcccctctctctaggtttcaggggagaactaatggcctgggtttatgggccttctcacgctggcccacttctaaagatatttttcttttatttatttctgttaacatttttattttaacaagtcaacccaaactaaaaaaacctaactatcttttaatatacggggtattacaccagggaggcaggaaatacatcagatgtgatctgatctcaattgaattgacctacaaatttaaagcaaatccaagggatagaatcctagcaacttaagagataaagaactaacaaactccctaacaaactctaaaccggaccacacactattcctcgtcacggattgccgtcgctgttcctgttgcggcgccgtttatactataatccccacatgacatctctccctccctggagaagcaactcgtccgtgagttgaaaatctggataccgagaccgaaattcatccagcgacatccatgaagcttcagctgccggtttatccttccaatgaacgggaacttcacgaacaccacgcgccaaatggcggcccacatgaaacacgtcatgtaatcaagcgcccgggggtagatgaaggcgatacgccacggcgccaatgacaatgcatcccaacttgccgcgtcccttgacagcgagagacgcaatcggatggtgaagcaaacgaagccaaacccagccacccacactgaactccaatgcacgatgcttgccgtcatacgccatcttgtaagtctgttgagcttgttctaaacgatcacgaaacgccctcaggaagtcgtcccgctcctgtaacgcctgttgaactgcgggcagacgacatgaacccggctcgtaggcacgcagcgtcggcggctcgtgaccatagacgacgcggaacgacgatgttcgaagtgacgactgatacgacgtgttgtagcaatacatcgcgcatggtagccatcgaagccattgacacgaacgattcctagtgaaacatcgaagatacatcatgatgatcttgttagtcacctcggactggccattggatttaggtgaaaggctgatgaaagattcagctgcacacccgccaaccataaaatttcacgccaaaaagtgctggtgaagactggatctcggtcgctgacgatggagaccggaaaccatgcaagcggacgatctcagcgaagaaggcagctactaccgacgtcgccgtgtacggatgagaacgggatgaagtgggcaccgttacgatgaccgtcttgccatgtactcgcgggagcccctcgacgaagtccatagcgatgtcagcccacaccgccaaaggcaccggcaaggattgtagcaggttggccggttggaggtgctccgtcttgttccgttggcacgtgaggcacgcgcgcacgaaatcttgcaccgtcgctctgtcccgcgagatatggaaatccgcgcgaaggcgagatagggtcttttgcgttccctcaagtcccaagccatgcaccgactcgaggatggccggcaatgattcggatgatggcggcatgaagacgcagcccttgaacatgatgaggtcgtctgtgaacgcctatgctggcggtttggcacccttggtgatgtcttcacaaatggcggacagggcgggtgtggaggctacctcgcgggacaactcatcgaacagggagaattggtgggggggatgataaggcgaacgcctccgccaggtgttcgtcccatctagagagcgcgtccgccaccaagttcgccattcccaacttgtactacacgccaaagtcaaagccgaggagcttgcttgcccactgatgctgtggaacagtggagagacgctgatccaagaggaagcgcaagctgcagtggtcggtgcggatgaggaagcgacgcccccacaagtatggccgccaatggcggaccgcctggacgaggccaatcaactcgcgttcgtaggcagcgagcttggcgtggcgcgacgcagtcagcttgctgaagaatgccaccgggtcgatgccttgatggagaacagcacctaggccggagcccgacgcgtggcactcgacgatgaactccttgtcgaaatccgggagctggaggactggggccgccatgagtgcgtgttgtagttgccggaacgccgttgccgcggtgttagaccagtgaaagccctccttccgcaacagcgccgtgaggggcgcggcgatggtgccgaagtcgcggatgaaacgacggtagtagcccgccaagtgaggaagcccctgaccgtgcgcgtattcttgggcagtggtggacggagaaggccggggcagttgacgcgggaaggagcgaaaccgaccaatgccggtcacatctggagcgtaccgttccaccggttgagtggcgagggccaattggtcaactggtcgctgctagggtggctagtactgttgctgctgttgtcctccgttgttgttattgcagcgacggttgcggttacctccctgccgatcggtgttgttgccacgatttccagcgttgccgtagccggtggagtatgcgggcttgcttcctaatggcacccccccggaagtggaaggtcggcctccagtgccggcgaggagagcagtagaagcttagcaaggacgacccttcgtcagttcttcgagcagaagttgagcacgtacttcggcaaatgtggggaaaggtttctgcatagtgaacgcagattgcaagtgaccgaatttttcattcaaacctcggattgtagttagggaaagagtgcggttgcccacatcgtccaagtcgtctgccatggtcttcaacaggcaacagtagtcgttgatgctcaaatcatcttggtagaagttgtaaaactcggtggagaggttgagagcgtgggactcgcggttgcccaagaactgaggtttgaggccacgctgcacgatgcgagccgtggtgttgtgcgtcatcacggactccagtaagtcgacggagatggtgccgtagagccacaaaactacgatgcagtccatgcacatccaatcctgacgatccggcctgtagaggttggtgaggacgtgatcggcgagcgcgtacttgtcgagggtgacgaggatgagaccacaccattgtgtgtagttgccgaagttgagatcgagggtgacgggcatgagagacttgatgttcagcatcgagaccgcctgagcgtggagattggcggtggcgtcattgttgaggtcgacgttgtagaagttctgggcagtaggggcaggagcagcaccggtcatcagagggatgaagccaccgtagccgggaggaggtggtggtggtgcaccagctgcttgaggaggaagacccactagagggagtgttgccgatgcagcgccaggcgtgatgaagaaggcggagacgtcctgagcaggcagagcggatgcagaggcgtcggaggtgccatagaggccaccggtggcaaggatggccgtgagctctggcggtagtgggagagagatcggcggtagtgtcgtgcctaagggggcagtggtgaagagcccggcagacatcgtcgcagccgtcatggtggtggtcgcggctgaggaagaagagttgtcgccgtgtgggtgttgccggcgatgaaagaggtgccagtaccagcttctcgatgaaagaggcaagggctttcctggtggcgcaggcagcagtggtggacgccgtgtcgatgacggaggcggctatggctgggtcaacatcaaccctagatgagggttggaagacatcccgaactgcctcggtgaccacagatgtgatggtgtcaattgcggcagagggggtaaggggagcgttgtcggccatggcgcaggagcaatgtggtggcggcggtggtggcggcggcggcggcgtcagaagcgtgcgtagcagaggagcgcatggcgcgatgcgagattagagttggaggcggaagctaaaagcatctgataccatgaaagcgtatagaagtcaacacgataatagattgatcatggacagagaacatatatagggacggtggacctgtatctctacccgacttatagaaacagaatcaggagataattaggaaaccgaacccaatacaaatatgactctaacagcctctgccgcccgctcccacacctgctccctctcccgcgccgccaccgagcgctgcctacgcctcctcatcgcgctgccacctccgccaccgccgtcaccgagcactgccacaacaacgtcctccactgccgccgccatcgctgagcgccgttgtaatgccccgaatttcgaattagcatatttcggggaatattatagcaaacgagcaaaagttcaacctttaaaccgttgttcgaataggcgatcaggaaccgtggatgcgtagagctcgccgagtagtgcaaaataaactactagtttatagaaatcagagtccgagcgaagtccccgggattgaaacgatgtgggccgttggatctcctttgtctctttatataactaacaaaaaaaaagaaagaaaaaaactctcgctacagccagccctagccctagccgctcctgcgctcttgccgccgccgccgctgccgccgtcgtcccggttgccgccgccgtctttgcgctgccaccacggccatagccggaggccgcagccgtcgtcatccatcacaacctgtgtttcctttccattttcctttttcccggtgagttctggcggctgttccttgttctatcgttgccaatctgattgcttgttgctggggctactgatgccatgcgactgctgctgctagggttgttgctgctgctgctgttgttgcttgttgcggtggccctgctgctgttgctgctgcatgatcagaggagaagggtagagagaggttgtacaggagggagaaggaaaggaaaagacagagcagcgttgaggaatttcagcaatttcgcaaattagggaaatttgtcgcaaggtagtgttccttccctgcaaaggcaacttctctttagtccctagaagtataagattcaaatagaaattgattggatagctgctcgtgcaattttttaggtgctttattataggatgaaaccatgttttcaaatctggtatgaaaccatcaggattcaggttagttgtcctaaataaagtttgtagtcatcgttgatatctttctaacgccgctggtttcgctcgattccgataaacggtttaggagaaacaacaaaaacagtactgttgaccaggtccgaaaatcaggacaccaattcgttttttcttaatatgggatttacagagccataatctgattttcctcccaacataaaagttgtagagaattttatctagatgtcaaagttatattattttctagattccgttagacggtttgcgagttacacatagaacagtaagggaactgctataggttaattaatacaaatcggtaaaaaggtctatatattctaggttatcgattttagtaaatatcacttgtaactatagttagttgaatatagtggtttatgcgtagctttgctccacaggtgtggagggttccaacattggaggagttgagtcggagtatcgaaggagttaagacaagtacaagacggacttgtgtgatgtataaactgtgtttcttgtttgatttcacatacccaattattattcgaaagcttactatcagtaattatgtggatttggtatcattgctacatatttacgtttcactttatgttcaagttcacgatgttattcatgtttcattatttcggatgtttttgtttacattattcaagtaccatgcgtagtcatgggagtgtaatttgggtctttattcatgatccttgagaagtgttgatcacgcttgctcggcttaccggtaatgctaagaggatattcatacctactcaggagggaactactatcttttgacttctttggtttaaaataaagtaaatccaacccttcatattggtttcttattgcattaatcatgtgtatgttttactagttcaatattgtacttgctgagtattctttactcactcttgtgtttaatttggtttttaggtacctaatgacattgatcggcatggggcgggagtagcacccttggactacactttattattgcacactattgaaatttagttttagactatgtttatgcatagcacaagttttgcgttgaacttgtaaaggtcatttaaagttctggtccttattttcacgtggaatttgtggagctaggatggtttggattgtgtggattatatcggtattgacttttcttataactacctgttttcacatggaatttgtggagctagaatggtttgtattgtgtggattatatcggtactgatttttcttataactgcctgtcgtggatgtccgtattttttaggggagattttaccgaaatttctaataattttgggacttaggttttgagtgtattttggtgtggcactctaggtacgtggttacctagggtgttacagccgccactacatccttcgtcaccatcgtcgatggccgctgctgcgccctctgttgccgccgccatcgaagaaacggcggtggtgacagaacagacgtcaaggaaggcggtggctgcagcgacaagaggagaacggcacgttgccaggctctcgagctcacccctcatcagtgatccgttcttcgctcaacctcgctgttgtcgcaggctccaaacctagatgacggtacaaatccagtggagctcttgctgctcgtcacctctcaggtcggtcccctctccctcaggtaactgatgtacttaaggatactaaattttacattaaaaaatgcattacctttcttgaaaaccaaaaggacacatatttttaaccagagtgaatattattttcttttgtacatatgatttaattggaattgatatcactccaactcttcaagtccatacttaatatgagtacatttcaggcggcccaaacgggggacacaatcctcctatgtcgccgggacatgcataactcaaatggagaaaggccatggaaggatttaagcagaggcaggaacaactagaatgtgcactgcttattcatgttcttccttctgtttcatattactcatcgtcgtcgttctaggatttaattttatattaaattatttgtcgttttctcgatccaaagaaattttaaaggtgatcgatattattccctccctacctacagtaatgcagcaatacatattgatgcggtcataattggctcatctactttgaaaagataattaagatgtatctgacaagggcaaccatgtaatctttcacatcttcatggtttgcacggtatttgcctggataacaagtaaattggaacagagagagtacagttttagactttcagtgtgttccttccaatataagaaggggtaattgctcatttcaccttgtagtctaaccactaatttgacttttcaagtttatgtatttaacatcgctttttaaaatcggagtactcgaggttgatcctattccatgaaggtaagataatggtgctaactaagagacgaattatcttttttcctttcctcatttgaccatgttgtataaacgtttttttttgtttgctcgaaattttttgacatactttaacacattgagcatattttgatatatttgagacaagtctaatagatttctcttctttttaataaatttggcttcaatttgatagaattttgacaaaattaaactttttttttgcaaaattttgagagcatgtcgtctcaattttgttcatccaaacttacatacggtgaagaaaaacacggatatagctccagaaaggagatgctcggccggcaaacagaggttgatccattgtcgccgcccagccggcagccgcccttgaatcaccctttgctgatggccgccccgctgaccttgccgccttggctgtgtgtcacgagggcccgactagatatggacagagcgagccagaggtggatgtcgagctcgatgcaggagcccacctaccgcgtcgttgctatcgtcgccactgtcacgtgatatcaccgtcatcaagcccattgatggctcgattttcttgcaccgccatcgcggcttgttgtgtagttggtcgccattgatagacccaaaaccaaaacctaaactgtgaatcatacacagtgacgaatccagaacaaaagttaccggagatccgatacatataattatttaattattaggtaatatattaattaatatggtacaaattagttagaattgaataatttacacgggtccggtgacctaggaaacactacgtagaaacacccctggccatggaactgcgtgagataagggagagaaatggtcaaatggagatatgacataagatttttttaaaaagtaatgaaatgggaacataaaatagagggaatatgagacaataaaaatgcatacttagagtggtattttcaagttcatttctaactaaagatcgaggaatggataaaaattagatgctagagcaagggaaaaaaagcgagagatgtgtgactcaattactggtcaaagacaaaatatgttttcgtggatgaaatagtcttccccttgacctttgactgcaggaatgacacggaaattctgggtgtgtctagcaaccaaaaaagcaaaagagtagacttatagttgatcaaagttgattacatcacattaatatgatagtactgaagtatatatagaccagcatactactggaatagtacataatttgttcacaagctgacaagcggcatatcgaagaccttttttttttcctgaacagtaacaaatagtataataagtgagccgataatataaatagcctatcatggccgtgagacaccagttaatttcagattatatatatggccgtcgatcgagctagctaagcaaacacaccatggctgcttctttcatggctcgcgtcgtgctaatcctagtgctgtccctctggctgctgccgtcgcttctgcccggttctctcgccgccggcgcttcatcagccggcaacgagcttttgccatgtgagtaatctgccattttttttttttgggaactaaacaagcaggagctctgtcaattatatttaaatcagtagagtaaaaacccagagacgacgatggttaattacaggaaaagaaaaaagaaggttgtcaatctctattaccagtactatagtcaatagttgttttttatttcctcaaacattttatgtcgagaagaattatatatttctcatgttcaagtgaaatctgtggtgcagactactactgcaaccccgtaagttaacgtactgatcacataatattacgaatctagataaacccatgtctaaatttattgtattggtgatgtcatattttatttattatttattttagagaagggtatgttttatccggcatatacatctaactgtatatatgcagtatttttaaatcaagaacttagcctattatatagctagggaacttagctatcaaataacccaaactgaaattcgttcctataaagatttgaactcagcatcttaaaatgctactctatttaatattctatttaatattagatttatattttgggacgaaagaaatagtaattaagcatcgttcgcgtgtgcatgccagtgagcggtggcagctccaggcggatggcgatggtgagaagcagggagaggaaagacggctatggtttaagtatcgcgaaatcagcacggcgatctctccggcttacacccggttatgaacacagtaagcagcgcttggaattgacaacaaattaagtggtttgataatttgatgctgccatggaaagtagatcatgttgaatgggagatatatatatatatatattaatatatacacgaaacatatacagagtttgggaaactatgtaggttatacatgtttgattcaattatgttttttaggttatgaagtagatcagttcttttttcctcattatataacttttcagggttattactagtatgcgaatattgattccagccgtctgtaaaaaccatttctatagtagcgactgtcttgtaatattttcctgctatattaatatgaaacctcatacccggttccttaaaaaaaattgccacttacaaactattccagttgttttgcactttaaaatcctatttagaacgttggaattttgcatgtttttcgcagggacttcacacaagcagtaattaaaaaaaatgttttttaaacagggacaaagatagctagcttttataaattactgattttatcaagtattccctctaaacataaaaatttgacgtttcaggttaagatttggtcaaattgaccatcaatcacttctcaaatgcatattttaaaaggtgccgtggatagatttttcatgtctatcataatatcgaactcatgtaatatgaaatcgatagttaaagtttttagaaatttgaccttctaaacgttgatatttatgtctcgagggagtattagtatgtacgtaaagtttaggcaaaatttgttacaggatactcaaagactgtggtctttgttgtgagacacccgaagatcgtgtatttgctcgtggacactgtaaaaaagtggtaattagctgctggacactcttcccattattttattatttccggtcaagatgaagagagaaagagttgtgtaagtaccaaaatgccactggacactgttcttcctctctctatcttttttcccttcttcttccttgcagcagagcagaggtgcgagtgtgcgacggcggctggcccgagcctggacggctcagccatggcgaggcggcggcggggcggtgtaggccccacatcctttctttttctcttctttctctcctctctcgagcaggcgtggtggcagacttgcgtgaggcggccggcggcggagcagggggcggcggcgctggagagagggagagagacggccgacgcgatggcgagctcggcggcggagagtagcggcgcgcggcacggcagcgggggagagggggcgcgcgcaccgcccgtcctccatcgcgatggcgtgcagcacgttcttgtcctccagcgacgccggcgtgccgacgtcggaccacgaccaggccacgttcttcttgtcccggaagtccagcaggatgatgaaggaggtgtctgtccgtgggaacatggtcgctgccatgagcgtgctcgtgccgtcgagtcactggagcttgtcggcgtcgccgagtgcacagcccggcggctcgtagaagaagtcggcctgctcgccggtggtgcagtcccagacgccaatgccacctatagctgactgaggtcttatgatcattgtgacaggatgcaccctgcatccttaaaccgtgacagcctctgcaaagccaacctcatacacactttgctgctcattgctgatcgatcacatgatgcatgatatggccattcatgtagagaagaatccggacaagaataactactagtggatcatggtgcagttgcagagattggggaggaagaagaacactcaatgaatgtcccttgttgcccgagacgcggccgattcgcgcctgccatctccagttgtacacgcgcgatgcggaagaggtggcgcaggtcgccgggaaggcagttatacacgcgcaggtcgccgccgctcctccatcgctcatttgtacacgcgcacagcgctgccgtgcgcgacgcagcagccgccgtcgggcgcggcgcggacagccgtcccgtcgcccgcggcgttccctgccatggacgccgccagatgcagctggtccccgtcgaacggcccccaccgtgcctcgcggaagaggtcgaggaggccgtaatagagcgaggtagagcgcctcgcgccccccggcaaaaccttcgcgttgctgtcgaagaagaacagagaaagagagattgacaagtgggcccatggacaaacttgtctttaacttaagtttctctctccgttttcatcgaaaataataaaataatgggaggagtgtccagtagctaattaccacttttttaccgtgtccacgagcaaatacacgatcttcgggtgtctcacagcaaagaccacaatctttgagtatcctgtagcaaattttgcctaaagtttattacttacatcatttcagaccctggggatggaccgcgtgaaactcctgtcactcctatagaaagaaataagcagccaggcaactgatcagagaaggaacacctctgatggcacaacaagaacacttgaacgaggaaatgattcagctgtgatcaacagaggttgtaataaaaactgttaaaaactctaataagaagttactccttacggagtaataatacttgtcattttgaacaagtctattattaaactttaaaaactttaaacatatgaagaccatatgtatagattagtattaaaaagtcttttcataaaatcatatgtattgatatttctatatatattgtaaaagaaaaatagtggtcaaaaatatttttaaatatcatttttgtccaaaacgacacgtattatcaacccggagggagtaacagatatgatagccagttgaaggattgtttgtctgttcattataaattttgtttcaattactcatacatattataagattatttgtaatgatgatcttccttttttttcttccctgccacgcttcgtattggcatggtcagagtcttcttcatgattctctatgtgttatgtgttgacaaaaaaatccacgtttggctgataatgtcgggtctgtgttggcacgtactaggtcgacgaacacaacggcctgggagatctgcttagcttctgtgcagatccaccggttgataagatacgggcgtgccagtcagtttgatcatgcaactgacaagatatacaaatagcatatcaataagccaattggttgtcaagccgatggagtaattcagctgatgccgataccagccgatgtcaatagggttttgagcaatcggatatatgtccaatatagataacgatataaatacaattgattgatagcaatgtaataaaacaataataacatccagtagaaaccaatcggctaacaatgatataatagaataagcactgatccgaaggttaaaacatacatcggctgaatgtccgatgtcataaaatccacaagattagataaacaatgaaacctttgttgcaacgggctaaatccaacttgtatgcaatccttgtaagccgaagcaacgtccagataactcatttgctgaaacctcaatgaaatccttattagcaatcaagaagcgggctagagattatggttctaagcacgacttaatagatcagacttaactaatgcaatactaagtatgaaaagaaacataatatctagaaaatcaaacatttttgtgtgattttcagggtggtagataccttagctaatctaatctagtaaaatgatttagccgataccagcataaaccctaaagcgagaatcggccgatatatctaaattgatatactaagaccagattaactaagatatatgataaataggtaggtaaatatatcaattgaaccagagcaatccaagaggtcaaatacactgatgcagccttgaacgacgccgatgaagccaatacaattgccagggccggcggaacataggacttatcccttcgtcagagattgaaagccgatgcaacccccgtcaagtgccaagtttcgtcaatgataagtaaaaaccttggtaaagaggttggcaatgtgccaagagtagttgtattgatctaggatatagtttacaataaccctgggtgcacatatttatacccataagtagatactagtccttgttggataagaaataaactttcctaaagataaaaggaaaacataaagtccttattgacactaagcacatttttctaaagacaaaaggaaactaacagactcttcctaattaatagataacttgccatgcatgctgcatccttcttgaactcggtctcttctggataagcttccctgaatagattaatttccttaaccgaatatagcaagaatccaactattgccgccttgataattcccatcggccgattacaggactctgaagccgatactgattctagatcgatgatgacttcggggcttactaaatttcactgttaacactatgtcccttctttcgaaagcccaacaacattaattgtcaagaaatcttcagaatacatttgttatagtaggggcctattgatgagaatgagagggtttattcttacacaccgagttgaataatcatgttcttaaattcacatcatcacatcacataccaaaattatcgaatactataaatgtacaaacttattgaaatgcggtagaaatatatcaatatttgatattgtcttgtatcattaataatcgactaaattaaccagcaagttcgaatgtgcaaatattacaatataaagaatgcaaatacaaaagatcttagacaaacaaaaaaaataaaacaatgccactaccttactctgcgcttgctcttagacatgaaagttttattacgtcttaactttagagaagatatttcactcaataaatatgactaagaatgattcaataaatcatcacataaattgtttctcaacttgttttcactagactcagtgcagaaaaaacactctcaacacttacagcggttaccgccggtaaaatcaataccaatttaagaagcaaatacacaaaatcataaaaaaaacatggttgtttgtttcaaaaagcaaccaattgttccaaacgcatgaataggtactaaaacaattttgagtacttttgtttttgcaccacataaattttccggtgggctcaccgactcgtgtaaaaattatttttcacaatcaatggtgtcaagcatattcccatatgcctgaaaacacttttgagtggtttcgaatggtttcattttcgcaccacacaaactttccggcaggcccaccgactcaagtaaaaatttctcacagtttggatgtaaaccaaatctattactttggaggttttatcttcctgaaagatttcaatattctctttacataccttggacatgtcttgatggcttcatgttatttttagaactattcaccttaacaaccaccgtttgctaaggtgatgaacatcacactaacatctacccataatggcatccaatgcacaattctgcgacgcgtgagtcacatagaaatttttcacaatgaacgcatccaatccattggtatgaaatttatggtttggtgctttttgaaccattccgttccggtgataaacttcgcaaaaccataaacccagaatggcattcaatgcccaactttacgttgcgtgagtcaccaaaggtgagtattttgataactgagcagaagaatatgactatagagttcgaaaacccgtaaacacgtaatattgcttgaagttacacattgagcttttgttttttgcgggcttcctgacccatcaaaccttagcttcatccctaagggcggcttgcaaaatggcaccccctcgccgccctttcgcagcgccccccaaacccaaacaaaaaaaggggcattctagagggcggcaatgggtctgcctacaaaaaatcctaggccgccctcacagcccttctgtaggtggcccttagcgcgaaaaaaatgctctctgagaggactgaaagaaacctccgagaggatggcaaaggggctgcctgcaaaatattcatccctcggcgggcagtcgttaagggggttccaatggccgtctgctacgtaggataaaacttctttccggagagcgttttttaaaaaacgccttctccaagggcgtgaggcgactagtattgcaaaatattgaaacaaaaatcatttttcaatattttagtaaataaaataaaaaaatccaaatcgacagtagggagaattgactgataggttggaattttgtggatgcctacgaaatagcaaacacgataaacatgcatgcagagagcaagctagctaattcggaaaccacacggaaaatattgaacaatagtttgtcccaaaaaaaaaatacttcaagagatatcccgcctcttcaacttatatattatgtaccgtgataggaatgtggcatgcatggttatctcgcctcattctcagtcaacgatttcatcagcctggatataactaatttatcaccgactcagattgaatcagtcgtgttgaaaaattgacatattattcagcgggaaaattaataacccttcttaattcttatgtgcctaggtagcttaacttgtcaagggatttaaatactcctaccatgcaagtagctagcatagccaagctacacacactatctgcagcagcgaactgaagtgaatccggcgaaaaaatttctgatctctgaagcaccatggaagctactgctcgacttcgcgtggtggcaatcctactgatgtcgtcgctcttgctgtcgccgccgtttcttctcgccgacggctcatcaggaggaggtagcagaggccgggagatgaagcacgatgatggccatctggttattgctccaagaaaattgacatggcctcgtcgagttctaaactctggtaagttcaaataggacaaattaattatgtctctctagatctccctctcctttgatgcaaattacagagaaattcagctgccagttttaatagaaggttgaactgaatcctgagtgaggtgcatacaattcacgttttcatatatacatatggctcttttatttcctgggtacaacttacaagtgaaacccacaccatacttacacacctgctcggatgtgttctactccctccgtttcacaatgtaagactttctagcattgcccatatatatatagatgttaatgaatctaaacacatacatatgtctagattcattaacatctgaatgaatatgggcaatgctagaaagtcttatattataaaacggaggaagtaaataagacttttttttttcaggcgatcaaccgaaccacgacccgatacataactctcctatctccccaggaagaagcaaaaatgaagtcaggcctggcaattgatgagagagtatccataaacacaaccacataaaggattggcatttaaatttttgctggaaacagatactctgcatttctgctatctgactttgagtggttgaaatgtggatctcacaaccaatggccctatgtgtcaatgatccaagtaaaaaaaaaaaaagtactgtacagaggagactcatcattttcgttgacagcctaaaacagtccaggaagagttttttttttcttcttagtttttttcttgggtgtgtggtctaaaagaacaacggcagtagccctggttattcagttatgatgttgttattgaaattattttacggatgtctgttcattagaatttagtggtaaaaaaagatattttcataggcaccctcttacattgcacatacagtcagcaagagcaattgtgcctatggaagccaatttctcgttgagcgcaattcctattttagttatccaaaacccctaataaagcatgacaaaagatggacaattaagccattgatataacgtttttcacgacatgtaccacatcattcaccatgatgttgtcccgttctttgaccatgaagaggaatcgataacaaatgaaaaaaaattaatatcgacctctttaattatgagtgggataagcatatgaaaaggaatttcacctagccacctatggaaattgttcgaggtggcttgctggtccacctgtgaaaaccactttgaatcgtctataaaattaactcttacaatagtgatactttgtgctaacacttattatatgttctagcactaacagttaattaattagtaacaatgggcggatgcgacgtaagatattgggcaagaattagcattttgcatgttaaacataatcaacgctttagtagctgtttagctcgcacgacggccgggtattattttttggtgaccaataattttttagatatcttatagttgagggaaaaaataattatgccgacaatggagtcgcggccgcgcgcccaaccggtaggattgcatgcaaattaacaagttatttgcgatacatgaagaaacacgcttcgacagcttggttgttccaatgtccgcatatcgtgtttacttcttcatatgcatttcttgtaagccctaatacttgattgaccccttcatttttgaaataataaaatcttcagaaagttatgtatgtaggcaatgattaattaataaatactccctccgtcccaggtttaaagttaaaagttaattttttataggacggaggagtaatagctagaaaaacatctttgtatggtcaaaatgtacgaatatccccctaggtttaaataaaggatggaccacgcctgctcacccatgccaaatgcccttccaccgcgcaacatctcagccaaaggtagcatatctgcactcggcagcatgtgtatacacaagcctattgccatgttttcacggcctagcattctccacattgcaaagaatgctaacgataactacagatttatatctaagaaagagggagaacttcatacatggcacactacatgctacatagctacgtgacatgcctcacgaccttctcccaccactcactcataaccctcatagtaattttgttactctcaagacacgctctccacacacatccataatagtaatatttttactgcaacagcctaaagagtgggctagggatgggaaaaagtgggttttctgggcttagaaggatgggctggcggcgagattggtggtgggtgttgacgatgggcagaaggcgtggcggcggagctacgggaatggaagcactagcggtgggtagggctagcagtatggatgagggaggccatggcggtcagtggtggtgaatcatacccgatggcataggggaatggtacccacactggcttaggatggaagagaggtaggggtggaagggggaggaggccggtcaggtatagggattacaagcaccattgacgtcttctggtcaggtggcaaggttaggggcaccagtcgggcgaggaggaagaggtgctgaaagactgtgcgcgtgagtgcgtgaacgagcgaagcgaagaagagatataaggggatacaagaagagtatgcacgaatctcaatgcaatcctaaccattaaaaaaatacttcatccgtcccataatataacaatctagaattgaatattttatagtacaacaaatttggacatgcattatgaaatatcacatctggttctaggttgttatattatgagacggaaggagtaactgaattgaatggtatttttcagttgactagacggtccttaatttttcaccccatgttactatctacctattgtcataacgtgtttttcttcaccgttgatcaacccaaagcatttgaattgacttgttggacgtctcacgtttgattgggtgcagacttgacaaacgtaatcacttgctttcactgcccatcaatgtcaaaataaatacaatgatgaaatattttctagtgtatatatgaagacagagagcgcatttgtgcatgttaaattggcacgcatgcatgcaaagaagtggtcttcgctgttccttttgacagtttgactgccggaatcatcacacagattgtttatgtctgtcagagtgtcagcagaaacatatcataattatagttgagttgaataggtcacctggataagacattgaaccttacctatgaagtttacgtatacagcaaacacatttttctgaataatcacctagggtgtgtttagttcacattaaaattataacaatatgacgaaaaaattgaaagtttatgtgtagaaaagttttaatgtgatagaaaagttaaaaatttaaagaaaaaagttgggaactaaccaggccccagcagagagagtaagagagcgcgtcgataaatagccgtacaagggcaacaggtcaggcacttattcagttcagttcagacatcacctagtacaatggcttcaccggcaataataaccatcctcgccgtgtccctcctgctgctgctgccgccgttagcgcttggctccatcaccggcggcgatcaacgacgcaaggagccttggattactacgatatgtgagcagtcgatcgatctctgaactttcagaaaatggaactttctggtggtaactaatatttaactgagcattaattactcatgtgttcatggcagtgaacggtggcggcagtattgcgggcatggagctgcagcaacgacgacgaggaggccatggattgccggtgatggtgagatcagcagcacggcgatctctcggaggacgatcgacacccaacagtaaggccaacacaacacacgtaatgaaaataaacattaagtaaggatactgcatataacaggaaggtaaaactaattagagtaaatttcagaaaactacatgttgtatggttcaaattgcagaaaaccacacatattttgacagttgacacttaagtacatatattttggtagtttagtttcacaaaaccacactatcaatgaatggattcacccgtgagatgatgtggttgttccatctaggatgaggacgtggcatcctattaatttcgtgcaatggctggtaataggatgccatgtcctcgtcctaggtgaaacagtcacgtcatctcgcgggtgaatccattcattagtagtgtggttttgtgaaaatacactaccaaaatatatgcacttaagtgccaagtgtcaaagtgtgtgtgattttctacaacttgtactacaaaacgtgtagttttgtgaaatttactcaactaattaatactccctctatctcaaaatataacaatttctagcctttagaatttgttctaaaatataacaattttttattaacattcttttcctaatcaatcacaactctccaccattcagttttcttacatacttccacttcttgtctaatcataaccttcccccatccaattctacctacttttttaataattgtctccaattctaaaaatgcttatattatgggacagagagtatataattaattaagtttaaaaaacatgttaataaaaattgagatagaatttgtatcttaataaaaagaatgagatttcagtactacgagtatttggcagtctattaactggtaccctgatcggccagttaggtgacattaattgttttttttttgttttttagaccctggtgatggtggacgtaaccctccagtctcccctgcacgagacagaccagggacggaagcctgatgaaatgggcaactgtgccctctgtgcccgagagaaattggtcccttggcagaatatccatgatttggtctgtgtaattttgtgcgaaaattgatcagaggcgccacacctgatctcagtctaatgggctcagtttgcggtgatgttgtactacatgctgacacaataaacctatctgacaacaatctgcatgccacaaccgaggcaaattgatgatatatatacagtgcacaaaatttattcagatcagattacatatttggataattttaccatcctttaatttagacgataccgataaatactatatttttctaatatcaaattttaatatctacgtgtactttcttaagaactataaaatttctcaatatatttagttacacacaagctagcactgtgtacgtatcatagccacagtagtgagtagtacactgggacttcaccgaatcagtctttggatactcactaactaaggctgtcgggcagagggcggtgaccaaaagcaaccctcccgcgggcagaccgacggcatcggctgcgggcgccagcgcgcccgtggagctgcaaaaaaaaacaacaacattaaacacaaattagtttgttggttcgtcgcatttacgagcttaattggtgagatcagcctgagaatatcgatcatgactgctcacaaggaggggtcaccggagtatggccgccgtccaccaccagcttgcaccggtagccgctcgtcgccgccagccagagcgccacggcgagctgaacgacggcgagtagacggtgtcgccgtcgcagcggcagaagcgccatcgcgacgatgtgctcaattagctcaggacggacgctaattaaagctaggtaaagtagagctctcgatcgatgcggtgaacttggccggccgccggtcggtaggtatgtacgcattatggacgtgcatgcacacaggatttgacaacagctagcaggtgattcacatgtacaagtggcgctgattagtcttcacttatatcctctaggacctctgctgtgggtgtgggcgtgtgcctaatgggcgatcgatcatccctatcccctctattacgctctctccccccttcctcctcccattcttctcttcttactacaccataaatttttaaaaaataaaaaaacaaagttggaaaaaattatgtatagaaatactatatataaaaaaaatatttgaatttaaattcaaatttgaaacgggtatgtaaacgtttgacttataaacttttggtctataaactttaggtgtatagaaatactatatataaataatatttgaattcaaatttaaatttgaatcgaatatataaacttttaacttataaactttgtgtctctaaactttaaatgtgtaaaaggtgtacaaactttaggtgtataaatttattaaaataggaaaataatacggtgccaaaaaaggaaaccacgtggaggagagggggtatcggctaatccgatcgctaggggcgatcgatcgccccatagccttttcgtctgctgtgctactactagttctaaattatttaaaaacactcgttgtattattttaaaaaaaaagaaaaaaacattttttttattaaacactcgttattttataagcaaatactattattttgattctactcactcgcaatttatattctatatttaacgctttgaatgagcttaaatgaaaattttgtcaactacgaacctgtagacatagtttagatatgtatacgactttcatatacattttgtctccatccgagatcatttagaaatattaaatatacaaatagatatgacaataacacattttcgcacatccaaatgtactcaaataaaaaaggtgataaactacagattgtagatcttgtcaagttctacaaattcataaaaagttaggtaaacaacacatatatgagtgatgtcatcatgagtgtcgattttaattgacaaccaacatctagaatcataggtgccggtttttattgaaaatcagtacacatgtgatctccaatatgtgtcggttcacaataaaaatcagcacctgttgggcgcactcacaagtaccggtttattataaaaactagcaactatgtaatgttcataggtgccactttattataaaaactggcacatatgacttggagggattattggtccttttttatgaattgcaccaataataaggttatgagcaattttactgtccttgaggaggtaccataaagtaccattttttctattataaatttggtacctcttgatacctaggtactacgaggtaccatgtggtactaaattttacactaaatttttggtacctcatggtatctcctcaaggaccgtagaattgctctaaagttataggtatcggttttaatttatagacctatgaaaaaggcaacaaaagtctcacatatgtcggtttttacgtaccgacacatatagtactagaaaagtgtttttcctaacgaccaaaactggtttttgtcggcggtcagcagtgtctctagcaacctaaggctagcgaaaatatatgattttcgctcgcagttgcggtctgcatgtaaaaattgatttttgcttgcagacacctatgaggaccggcagcgaaatctttttttttttttttgcaaaggaaaaaatcaatcaacactcagaaacggtgctgcattttcaaattcacatttagagatccagattcgaatcaattcaaatccacatcagatttagattcaaatccacatcaagaaagcactacatcgatattttccactacattttcaacgtgcaaacatcaacacactgaaataaaatagcaccaacaaatgtcgatcgttgtggcaccgtcagctatcggcgtgctggtcatcgtcatcacaggtggagtgagagtgagagaagaacttagctcggctagatccggagctgtgccaaaccagccgtcgctgctgagcctcaccgccctctccttccttctccgagtttgagggcgcagccacctgcaagagaggccactgccaccactccgtggatttagttttgtgatgaatgttctgggatgatttgatttgttgccgttggatttgtgattcagttttttaatgaaatttttggttgcatcgagccctttttattattattcttgagacaataaatgtgcggtttcaaaatcggcacctttgatttttctctgacagttgtttagttatttagttttctttagtactgtctgcaaatcaactccttgatagtactgatattaatttggttgacagagttgtttttcagatcccggggacggcggacgtgatcctccggtctcacctgcagggacagaccagggacggcaggctgattaactgcgcccaagatcgagaaatttggtgacttggcgtaaaaaaagaaaaactcagcacggactgaatgaaacaggacaacaaaataatgtaccctaaaatataagaaactagcaccaagtagtactactgattatactgcattgtgcatagttttttattgactataaattaaagctgatgcaaattgttgatgtgtgcaaatctgatgcaccaagtttattcagaaaacacacgtatagtagtacagtgcgttaattggtactccatacttaattttctcaatctttgttgctcgatacgacgacacatactatatagctaaggctgtaggcgcaagtgctggccggagcaaccctccggcggcgacggtggcggagggcgatttgcctttggagctgcaaagcaaaagggagaaaaaaaaatacatttcgttcgtcacatgtccatgatgttaatttgtgcgtgcaccggtgaagaaggatccggccgggctcgccggggccggagaagaagagagaaaggtactcacgaggaggagtcgccggcgtacggccgccgtccaccagcacggtcggcggcggcggcggtggcgggacggcgtcgagcttgcactggtagctactcgtggccgccagccagatcgccacggcgagctgaacgattgcgagtaagcggagtcgccgcagccgcgccatctgatcacaatcagaagaaacaagattttggagtgtcttgtgtctactatagctactgtactaaaatagcggcccggctgttcaggatttgacgacagcagcttacgtactccctccgtttcacatgaatcctaatcctgaagattaatttggatacacgctatgtccaaattcattcaaagaattatttctttttacataggaagtaattattagctcatcaagtgtacacctatatgccaaagtactcccttatactctcaggcatgctaggtagatagaagtgataacttattttttctaaaaaaagggatcatcacgtgataataatacctctaatatacatccgtcccaaaataagcaccaacctcatattagaatgtaacacatcctcataaaatataaatgatgtatcacattctagcatgagattggctctatgtccagattcattgtaatatgatgtgtcgcacctatatatattagtctaactaggatgatagcccacgcattcgcgcgggcatgtgtattagtttgttctgaaaatagttctaacaaaataaagtgaaattaaggtaaggtgttttctatttttaacagggtgttcattgtatctctttttgaagaaatctcgataaacttttgctggcaataaatgtttttttccaccttgtcaatcctctttttaattgattcatatatatgtgtaattcgttatgcatgtgaatcaataatgataagttcttttaaaactattagttatattttgaatgtagtgattgagtgattataatttcgaatttgttttcaaatcaaattattgtgttattctaaattttcattttaaggattttaatttgtacttaatctcgtatcgtgttgtatttggactcatcttttaatatttattttattattattccaaattttagatatttataacttatacttttatatggactgttttatattatacatgggatcttgttatacattttttaatagttttaatggttttttttaaaaaaattgaatgtgtattttaatcaaattgcttattttttctgaatttaattctgaacacctcggtgatagaaacgtctctctctggccctcctctcggtcctttgtccttcacctaatcatctagcatgctattaggcttaggaagtcatggaaagtctatattggcgcttccgtcggtgtccacctcgctaaggttgtgttcttcccccctcctttcccaacttaactctctcgttttcggtgcacatgctttccaaactaataaacggtgttttttctaaaagttttctatagaaaaattgctttagaaacatattaatccattttataaaaaaattaactaatacttaattaataataatctaatgtaatgagtcgctttattttacgtgcgtgggagagattagctccaaaacctatctaatgaacacaacctaataatatattgcagctccgcctccgttgagttcaggcccagggtatccaccatggttccaaactctttgatggtggttgaatctagactttagactcacatatttgaattcatttgtcttttcacagtgcaaattttgctcaaatatttgtagtcataatggctacattatctaaattttatatagtaaatatgggtaaatggatcttgaattatgtatttaattataaataacatgacaaaatgcaaataaattgagaaaagtgcatgtaacttgagagtcatgatcatttaactatctgattattattttttatatattatatgttagctagaaaataggaaatgttggctcgaaaataggaaatgttggctcgaaaataggagaggagactgggatcccggaggagagagttggagggttgagagactacgtatgtacatgtgtgcccacacacggcggggttgggggtaccatattttcgtgtattggggataccatattttttttttgagagatctaatggttaaaattagtgggtccgcctatttaaagaaatatcaatggttagtctttttcttttttatcaaaacttttaggatttttttctaatttattagatcgtcaaatggcatcttaagaacatttgtaaaatgccatgtgacagtttgagagcgtttgtagggagttcaatgaacttttagtatataatagatgtttaatggattttagtatataatatatagatagatgtgtaaagaatataatgcagtaaactttcttcaaacattatatacgtttatgatgatgcagtctaggtttgcaaagttataattgtttgtttttaataatgaatgttatttcaattatccttagaaattataaaaggaaaggagagaaatatggacgtgataagggtgagcggtttcgcacgtgcgtacgtacttacttcatatgtacggacttatgggagagctggggccgttgtacattaatacaagggtttataatatcggacccactaatttaagtgaatattttaagggttagatattttgcttttgtagaatttctattatttatttatcagagcgccacgtggtagcttaggagtatttgtaggggtggcatgtagcgacttaggaccgatttaagtgaatatcgatggacaaatatttttgttacaaaataatataaaataatgggtacataatataatataatggtgtaaactttattttcaaatattgtagagctaatttatttatgttcacttgtagagatttgtatgctggtatattctatatttgtaaagtgacttttattcaaaatttattatcacttattattattattagtattattattattattagtgctactattattattattattattattattattattattatctcaattatataccggaaaaaaagagaaagaatagtaacgtaccttggaaaaaaaaggttatgtacgtgcatgcaccccctttaacagatcgcatgcaagcagtaacgtacctatatatggaatggaacagaggagttattttgagataaatctaatctaacggtttataatattggacccaccgatttaagtgaaaatcgagagatagatatttttcttttttctcagattttttagaattttttctaatttattagagcgccacgtggcggtttgagagcgttttgaggaagcttcattgcttatgatttagggggaaaatattgtttgtgaaggatcaacttctgtaatttttaatagaaactaggaaggaagcccgcgcaaatgcttgggtaacttatttataaaaaattactaaaagaagtcatacttcaccatattaattataagaaacgcttatttattatttataaaaataatgctaaagaatcctatatcaccatattaattaattataaggaccatagatcaccttataattatataaaaataaatgtctagacacaacaaaaagatcatctctacttcataccaaattgttcatgtctcacttgtgttcaaatatatgcataaatattttgaaatattactcctaccaattcatgggataaaaccattaaatttatgagtaagtatactattttttatgctggtatattctatatttgtaaagtgacttttattcaaaatttattatcacttattattattattagtattattattattattagtgctactattattattattattattattattatctcaattatataccggaaaaaaagagaaagaatagtaacgtaccttggaaaaaaaaggttatgtacgtgcatgcaccccctttaggaatggaacagaggagttattttgagataaatctaatctaacggtttataatattggacccaccgatttaagtgaaaatcgagagatagatatttttcttttttctcagattttttagaattttctctaatttattagagcgccacgtggcggtttgagagcgttttgaggaagcttcatggacttttagtatataatagataatagatagatagatttgaaaaatctcaatcaggttgagcaatcttcatcttggcatgcagaaaaaggggacacaatatatgttggaataatgggctaggcccaatttattctcaattaattctattggtccacaattaatactatggggattaatatcagcttgaaaatttaagtgggaagatctcaacttaaataaggagctattagagagcccctgttaaccggttgaggtggtggtgggacagccacgcgcgcgcgcgccgggctgggccgaggccttggcaaggtaggcaggcggctggtctctctctctcgttttcattttgtaacagacggagattgattcagtaatcaattcggttttaacgagagcgaattcattcgatgttaatcatgtgattaattacgcagattgaatccgagtgttatccttgcgctacaattcctctcagcaacagacagaggagtaacatctctctatctcctagcggactgtctacttcctcctcgattccccttccttttcctgagctgcttctggcttccccggttctgttcacttgcgcgcacgggtgatcaggacgagcaggcctccggaactccgtccagttgcgtacctgcatgggtaggcgggcgatcaagtttttggggagcgctcttgggcgcgactgctcctgttcgacaacggttctacactgctacatcttcgccaacatgtcgacggacaacaccaacactcgcactggcactggaaagcctcaactagtacatgagcgttctcagggtatatgtccattcccttaccgttaattatgctgctagaagatttttctgttaatgcttatcgcaatgttacaattgcgttactatgtgaatgttatacttattttatgaaaagcatgctcatgctgagcaccatcactagatcaattctcattgcaaatgtcatgtttattatcttgttggtggacctgcagccaattttgggtcaagaagaagagaacgaggtagcggagaggtttgaggtgatgttgtgtggtggagaaatgcgtgagatgaggattgtgtccgatatttcacttcgcaccggttgctcgatctgaagcattttcggatttgtgattctattttgaacatttgtgttgtggtactgaaatttccgagatttcagaaaaactttttaaaataattcgaactaattttagccaaatctaaacaaatttggaccaaattcaaaaaaagagaaaaaatttgaaaattatgacgaaatattttggtgtccggtgagggtccgaaatttcgggaattccgaacgaaaattataaacattgtgcatgggagtttaattacggggatgggaatttatcctcatgactccctgcctttcaatacgctgggggaattgggaggaaattcatcttcacttaaaatataatttccttctatactacgtaagactatcggattgaatccaataaacttctaaactgcctaagatatctgtccaaaattagagataaattagcaacaccataccaaaccaaccaaaatgacaaattaattctcagtccaaaattacatgcatggacagtgcagcaacaaccggcatccatgaatccataaaccgagagtggccaaacagctgctacttcacctgcactgcaacttcttgcgaatccttaaccctctgaatctgataggttgtcaagataatcttgcatttgtggctttgacacgacgacgatgacgaacactgcctgattctgatggagcagaagctgccatttcccgatgggcacagcaagctattcgaccgaggaatctctaccttcgctgccgatgcaacctcttgcaccggcagcaagctggtcgtcggtgccgaggagaagcccttctcaatgttgatgttattccaatacactcctataatcgataatattgtaagctaatatattgacgtgcaattcttttacgtcttcgcgaaaaaccggtaatgtcgtaaggaaatgcccccaaaagctcccacgtgttcacccttccaacctcttacaggctagatgttgaagaagcatcctgggccgttggatatcaatccaacgcatagcagtagtcgaccgagtagacattgacttgggccgtgcccggcccggcccatcgtgcttcgtgccaaaacgggccgtgccggaacaaccccccaccacggcggcggcggcggcggcgccatggcgaacagcggcaagtcatcgccggcggcgacctccaccaccgcgccgccaccgggtcggccgaaggcgaaggcgccgcccctcaccgtcgagggctaccccgtggagggcatctccatcggcgggcaggagacctgcgtcatcttcccgacgctgagcgccgccttcgacatcggccggtgcccgcagcgcgccgtctcgcaggagttcctcttcatctcccacgcccacctcgaccacatcggcggcctccccatgtacgtcgccacccggggcctctaccggcagcgcccgcccaccatcttcatccccgcctgcctcagggaccccgtggagcgcctcttcgagctccaccgctccatggaccagtccgagctcagccacaacctcgtccccctcgagattggtcaggagcacgagctcaggagggacctcaaggtgaaggccttcaagacctaccacgccattcccagccaggtgaagggttcatcagttcttggttgttctggatgaattattcttgattgattgatttggtcggaaatgtgtggtgaatttggttgagatgtgatgtgattgtaggggtatgtgatatacacggtgaagcaaaagctcaagccagagtatcttggcctccctgggagcgagatcaagcagctgaagctgtcaggtgtggaggtctgttgttgtttttttttttttttgatattgtggatgtctggatgaaatggaatacaattcacaatttagttatgttgttgatgctgtgcgtggttctgtttttcagattacgaatacattgacggtgcctgagattgcttttaccggagatacgatggcagatttcattcttgatcctgataatgcggatgttttgaaggcgaaaattcttgtagtggaggtattgcttcttatcgtctatatggttaatttgttgtcaattgtcattgttgctattcagcctgagaaaaaaaaaagagggaaactgtttcttcaagcacggatatcagtatattaccaagattaattttatcaacagaaggaaaagcaacagcctttgcttttcaggagagattgattccaactccatattaactgataactgagtaccattttttcaaactgaaacctttgcggaaccaattggcagcaattagtgggaactatgttgcctgaagcatgtttcagtttccatactgaatatttattgtccttctcctgacgaaattttaattatctccaaatttaacttagtgaactgtgttctggaaattgcagagtacttttgttgatgactctgttacaattgagcatgcaagagaatatgggcacacccatctgtttgaggttattcccaaattttgcttatttcatatttctgtggaagaaaaacatttcacctagcattgctaattttgcccttatcttttttttttatgtatgcagatactgaatcagtgtgacaaacttgaaaacaaagctattctgctaatccacttttctgctcgttataccgcagaggtgagctatctctgttgtaatccaattttacttatatcattttatcctgattcaattagtaatctgtatgctttgtttcaactctgtggatttattttttgtttcaagcaagtttcaccaatattgttattttttaatgccatcattatgagcaggcaaaatgtgcccacttttcttgtagcatcctcctttcctcttaaaagtacacatgtttgtgtttcattctttacaaataaatacatttatcttcaatttttttctcaccatcattaaacatttcatcacatccttttcaggaaattgatatagcaatcaataagttgccaccctctttcagaagtagagttcatgcattgaaggaaggtttctgacaaagatgaagtgatcaatcagaaatgaagcattcaaccttactctcctctcgatgcactcatgtaccaagaactctttttttttttggggggggggggggggtggggggggatcgaatccttaactcttgagtcctgaaacatttctgtagcaccccttcacacaccgaacattaacaatattttacatttttttggtcattggtgatcgcaaagagcaatcgttacatccatgctgtattacattatacatagagatagtacatgttgtggataatccctggcccctcttgaaaatacgaacataccaaaattcactcaatttcaagacaaaatggacaggaaatttaacctggctacccttccatttgtcacccttctatgtcgtccaaatgtttaattttctttccccattatattttttttcttgatgatgatgatctccgtggtcgctcatgctgcatgcctacgtgacgtcatctcgccggcggatcagcacggctcgccgggccggcaggagagcgcgccggcgaagcgtgtgagcctcctgacgtaggagcctggcttgggcttaaccatgtcggagcccttcaccttcctgttgatggcgccgttggacgcctggaagtaggcgccgttcatgaacaggtctccgtccgagcgccacgcccagttcttccactcccactccggcgcatagtgcctcgtgatctgctccatcacagcatcgactgtttagacgatgacacggtctctaaaatatggtcgatggtttctttttttaatatcaacatggtctttagaatacgacggtattgattttcgtgtatcgacacgatctacgaaacatgagactagtaggtgttacttcctccgtttcagcttatttgttattctagcaaatttcccataaacaagtggaaaattacatcgttacctcattaattacttcctaattgtttcccaaagcttatttataaaccgttgtgcacggttgtattgataaaggttagagatggaaagtactctctaaaatattttgcattccggaaaacggttattactattttgataaggaatttcaatgctagctagaatgataagtaatctaaaacgaaaggagctaatagtaccagtttggcggcgatgttgggaggggcgatgtatcggttgccctggctgaggatggtagggctcatgccgccgccgatggcgtacatgagccagtgcgtgtagtcgttgttgacgacgtggaagaacccccaccggcatcgcggcatccgctgcacgagcccacggccgaagtggttgaacgccacggtgatctgcatcaccttatcctgcgggtagggggtgataatggatcaagatccatggtttttttcttttcacaactttacctaagctctcatatatttttaggtcaaatacaaattaaattttagcacaccctattttgaactcagccctcaaatttcgcaaattttaaaagttggaccatttattagcaaccttaattacctgcgggtacgagtcgctggcgccgaacagcatgacgtcgttgtggttggtgaagtggctgttggagatggtcacccccgtcgagccctgcacgacgtcgatgagcccgtcctcgcacatggacatggagacgtggtccacccacacgtcggtggcggcgaagagcgagatgccgtcgccgtcggcccgcgtgcgggggccgatgtgcgtcggcgagtcgcggaccgcgccgccgtcgctgtgcttcacgtcgtggacgtggaggctggtgatgatcacgttgcgggcgaactggacggtgatcccggcgccgccgcgcgcgatgtgcacctgcgcgccgcggccgtcgatggtcttgtcgctggcgacgaggagctcctgcgtgaggcggatcaccatggacttggcgaaggtgatccacagcggcgccgcctgcatggcgccccaccggagcgtgccgtagcgcgggttggcggcgtcgccgtcgccggggtcggtgacgacgtagatcttgccgcggacgccgccggtggcgccgcggccgaagcccatggcgcaccgggcgagccgcttccggtcggtggcccagtccttgcggcagcgccagcaccggtcgatcgggttcgtcgccaggcacggccccttgtacttgctgttcttcccactcaactctcgccggagaacgccgcgctccgtcgatctacatcgtcaaacacatgggggtaatggattctaatatctcgaggaaattaaatatcccctcgtgcatgcacatttttcaatcaaattcaatgcgaatggctgaagaaaattctaaaaaataagttgacaatgtagagtacggtgccaaaaggatatttactggagggattaaaatagttttattgaacgcatgcgcttttgtcatgcaacgataatggcaatctaggattccatcccccgatttcaaacgtaagtttgaaagaaagctagttcaaaattcgaacaaaaacttaaacataatacgaattccgacaaaatttgaacgaaaattgtgtgaatggcatgcctgatgacagcgtggttgaactcgttggtgacattgaaggggtccggtttgtacacctcctccgccgccgcctccgccgccgccctgcgcttctcccaatgctcgtcgaactcgcctatgccggcgttcgacacagcggccgccgccgccaggaacacgccggcgacgaggaggaaggagccgggcttcctccactggagcctctggtcatccatggatatatatcttcctatatattattctctttgtctataactatatactatttgtcatgaaactttgtttctctttttttcttttcttgattgtttaaataaaaaaaaaacttaatagggttggattttttttggggaaaatgaaagaaccctattgctaacgtgcgtggattgaggaaggagagggttatatatggaggatgagatggtataattagagaagaggtgtgaggcgaggaaataggcaagaaaaagctctgggttttttttttgtgtgtgtttgtgtgatttaattattggtggtgaagaagcttgtaagaacttgtgtgccatcaagtgacattactttgtttttttattgtgtaatatttggcgctctattctttgtagggagagacagggcaaagggttagttcaaattaataattcctgttgatcattttttttagattaattgatttttattaattcagcctctgtatccacgaaggatatacacagccattttttttaggaatacacatattattgtattataaacacctctcaaacaaagattgaaaaggagataaacacctctcaaaggtctaattggattcaattcgtcctccagtatatcccgggattggacactgtcatcgacgtcgtcctatttctctgaagctgaaagataaagaccacccagatgaatcacaaattcgtcgaaaccgatgaaccaaattaaatgggaaaattcttcatctaagttcatacagaaaaaggacctgggtcttttcatcacgagctttgaaaagattgtagacctccgagtgatcataacacttggccatcagctggtacagctagctttgggattctaggcgaaaacggaattaaatcacaaactgataaacaaaatgcaaaaatttgaatttcttttatgttgatttggataatcggaggagatcgttgaataggcgaactgaccgtgctgcatcacaaccggtcgtgtacacaatcatttttgcagaatgtgggtgacgtacggtgtgtgacaatcagaaaaatctgacttttttttaaagatgcggacatccctctaaatattttttcaagaaattgtgagcgtgttggggattaaacatagaacctcggagttgaaactacacaccacttaccgctacactatcaaatgcatctcctactcttatcgtatcaatgtgcttggtagagccaaaacattggataggcatgtacatgaaatgtgctttcaaatcataaatttgacacgagtgttcgtatttatagctaattattctttcaatggtaggcgatgtacccgtcgacagcgatacgcccgtggtgacttcgttaatctcaagatatactgacccagtctttcggatgtcctcatatgagtagggtgtgcattcataaacggatgagtgtgcgtgtgttatgagcgtctacatttgtactgtgtttatagaaaaaactttggataggcataaacatgaaaggagcccccatgtgatatttacgtctcgcgtgggagcaacacaccctagcaaggattgcgtggtgccaccaggacatccgtttctatctctttttgcatctcttttctcaactcaacgtacacgcgtaagagttggttttaactttttttcgtccaaattgctgaaattgccaaataggacattacatgtccaatgagtccctccaaactccgttggcaaattgcaacttttgcaaatcaacctgtacatcgtacaccacctgtatatatagacagaagcgcacataggacagatagctagaaagaaagaaataaagcatatacttttaagcaaaaacaaatgtaaagagcatgtcaccttgtcgattctctatggtgatagggtccagggcaatgccatgtcatgctatcttatccctgtgctttgcacacagctttttcaccaaatccctgcaagaatcctcctataaatacccacccaattgatccatcaatttcccatcacaaaacacataaaactatatcatcatcttccatagctgtacacatcctatattttcattcatggcgatgacaccgcagctagcattttctcgcatgcctccagggtttcggttccagccgacggacgagcagcttgtcgtcgactacttgcagaggcgtaccgctgcgcagccatgcgttactcccgacatcaccgatatcgacgtttacaacgtcgacccgtggcagcttccaggtgctatatatatgcgcactttaatttgcatgagcctcactacatacggtgctctctactggtagtagaaatcaatctaaaccgttaatcttatttgaccgaatggttcagagatctatttatattatggtagtaaaatcgtggatgggtgttatcgtcagaaaaaaaaataggggtgaagggtatagtcgtcatttagcagtggctaaactcttttttctccttttttggctttttcgatgaaatatgagcgatgccagcgcaatagatgatcatagatcaatttagctgagaaaaaacataaatgacaaaataatttctaatcattgtattagtaaattactaatttaccttaataatactgatactagtagtataatactaccagtagagagcaccagagcgtcgatttgcatacgaggcagggcggaggcaggcctaggacaggtagggcttaagccctaggcttgttgcctccaaaatcatggttaaactctcttaaatcatcatttaaatttgggaaaagaaatgaataactaattaataacaccctacctttgtcctactcttagagtccgtcactgcatacgccgaagttctattgatagagcagaaaaaaattacaaaattataaccctgaaatgtcgaaaccaggaaaaaggaaaaaatatatattgattgtgaccctgatagatgcgatactaatgcaacatatattgactgtgtttgtagccatggcgatgtatggatcggatcatgaccggtacttcttcacgatggcggcccgagaggcgcaggccagacgaacgacaccgtcgggtttctggaagcccaccggcacaaagaagacgatcttcgtcgtcgccggtgggcatgaggtgcccaccgccgtcaagaggaggttcgtcttctacctcggccaccaccaaccatcgggcagcaacaacaacaacaaaacatcatggatcatgcatgagtaccgtctcatgaactctccaagagcggcagtgccgtcgtcttcttcggtgaatcgtcttcccactgatgatctcacggaagagatggtgctgtgtaggatctccaacaaggacctgcctaaaccacccttcatccacaacagcttgttgcagttctcttcagtggggttgaatggtgatgggtataattacttgatccttgatcaccttgagcctccagcaatggagtatcctaatgttggcattggtaatgttgatgatgctgctgctggtactgatgatccgggtgaccttgatgaggagattgatgatagcatgcaaagaaaccatggtggctagaattaaccagtagcatcatgagtgaatggttttgcgggagatttgagttaaatatcagataataaaataataatacaaagaataaaaagaaaaacaaacctgtatagttagcaggttttgattcatttcgttgaactttgtgtgcttgttagctagcctatataccaaacatgccttggcgaggctttctatttgtatatagctttttttcttttttctattgtaaggttcgaactctattgagttgattgaataaacattatgcaatttatgtaacatattgtctataaagttctattggcatgcatattcatatatagttacagtcctttagttttaaattgaaatttcattttaaaagttcattatttgtcattgacaataatgacaaaatgctctagtatgttgtttccatttacaaatggaaagtccgtttggtttggctgttactgtaacaccccaggtaaccacgtacatagaatgccacaccaaaatacactcaaaaactaagtcctaaaattattagaaatttcggcagagtctcccttaaaaatacggacatcacgacaggcagttataagaaaggtcaataccgatataaaccacacaatccaaaccatcctagctccataaatcccacgtgaaaaataagaatcagaaccttaaatgacctttacaagttctatgcaaaacttatgctgagcaaaaattatagtctaaaactaatttcaattgtgtgcaataataatgtgtagtccaagggtgctactcccaccccatgccgatcgatgtcattaggtacctaaaaaccaaattaaacataagagtgagtaaagaatactcagcaagtacaatcttgaactagtaaaacatacgcatgatttatgcattaagaaaccaacatgaagggttggatttactttatttttaaaccaaagaagtcaaaagatagtagttccctcccgggcaggtgtgaatatcctcttagcattaccggtaagccaagcaagcgtaatcagcgcttcacaaggatcatgaataaagatccaaattgcactcccatagctacgcatggttcttgaataatgtaaacagaacatccggaataatgaaacatgaataacgtcatgaatttgaatatgggtcgaaacacgaataaatagcataacgtcatagccatacaatcagtaataacaagcaattgaataataattatgcaagtaaagccaaacaaaacaactcagttttgtccatcacataagtccgtcttgtacttactttaactcattcgatactccgactcaactcctccaacgttggaaccctccacacctgtggagcaaaactacgcataaaccactatattcaactaacgatggttacaagggatatttactaaaatcgaaacctagaacatataaaccttttaccgatttatattaaataacctatagctgttccattactgttttatgagtaactcacaaaccgtctaacggaaactagcaaataatacaacttcggacatctagacaaaattgtctacaactttcatgttgagcacaaaatcagattatgcctctgaaaatcccagattaaggaaaaacgaactgctgtcctgatttccggacccggtcagcagtactgtttttgctgtttctcctaaaccgtttatcggaatcgagtgaaactagcaccgttggaaagatattgacaatgactacaaactttatttaggacaactaacctgattcctgatggtttaataccagatttgaaaatacggtttcagcctagcgttcgatataaaataaattcgaaaaaaccggaaacagatcgtcttgaatataaattagaaacaactatagactaaaacggattacctagcagtactaatgtataagaaaaacgaagaatttggaaatattcaccaaattccccaaatttcccttcttctatcaaatttccccttctttccctccttcctgttcttctctgccttctctccctccttcctgttcgttgcaggccaacagcagcagcagcagaaacgaatatcggcagcaacagcaagccgtgcaccaccagcaaggaagagatcagatcggcaacagcagggttcggcagcagcagggaaattaacagaaacaacagtagctcacaaacgaccggctgcggacgacgacggctgtggcgaccggcgacggctgcaccagcggcggcaccggcgaagagaggaacagcagcggcggcggcagagtgcaggaggtgcggcggctagggctacaggagaatcgctcctgtttcttttttttcgtttgttttttttggttggttatataaagagactaaataagatctaacggctcacatctattcaatcctcgggacttcgttcggactccgattactataaatttatagtctattttgcactactcggcgagctctacgcatccacggttcccgatcgcctatacgaacaatggtttaaaagttgaacttttgcgcgtttgctctaatattccgcgagatatattaatttaaaactcggggtattacattcttccccccttcgatcgaattcgccctcgaattcgcccaatcatactctagaacacgggatattacattcctccctccttcaatcgaattcgccctcgaattcgtccagttatacctcggacaagtatagaaaggaactcataggtaggacttatataactcaccagacgtgaataactctggatacttctcccgcatctgtgactcaagttcccatgtggcctctcgctcggtctggtgcgtccagagaaccttgacatacttgatagttctatgcctgagcaccctctcagattcctccaatattcttacaggatgagactcaaatgtcaaatcttgctcaatggtcatcggctctacggtaatatgatgttcagggtctctcaaatattttctcaacatggaaatatggaatacataatgtacacctttcatggactctggtaactcaaggcgatacgctaggattccaactctttccactatcgagaatggaccaatatacctagggctgagtttgcctttcgttccaaatctcacaacacctttggttggagatacctttagaagtacttgatcgcccacttcaaactctaattctcgtcttctgacatcggcgtagctcttctgcctactttgagctgcaagcatgtgttgtcgtatttctgctatccgttctgtggtctgttgtacccaaccgggtcctaaaatagctctctcccctatggaatcccaacacaatggggatcgacactttcttccataaagtgcctcatatggtgccatttgaatgctagcatggaaactattgttgtaagaaaattctacaagcggcaaatgatcctcccaactgcctttccatgaaaggatacatgatctcaacatatcctctaaagtttgaatagtccgctcagattgaccatcagtctgagggtgaaaagccgtactgaatttcaattgagtatcaaatgcctcttgcacagattcccagaacttagaagaaaacttagcatccctatcagaaacaatcgagcgaggcacaccatgtaacctcactacctcgcgtgtatagatcggtgccaagtcactcgcagaataagtggtgcggatagaaatgaaatgtgccaccttactcagacgatctacaaccacccagatggcgtcctttcctcgtggagttcgaggtagcccaaccacgaaatccatagcaatatcatcccaaggccatacaggaacttccaatgattgcaactttccagcaggactcttatgttcagcctttactcgctgacataccccacatgacgccacgtacttggccacatccactttcatcctcttccaccaatagatcttcttcagatcatgatacatcttgttctccccaggatgcacagtatatggtgttcggtgtgcttctcgcaaaatctcttccttgactttagctttttgtggaacacataaacgcccatggaatcgcacagctcccgaggaatccaaagtgaaatctccagtttttccttcctttacacgtttcttaacttgttgcagcaaccgatcgtgttgttgggcctctagcactcgttggggtatggcggactcaagaatgactcgtgactcggtacttgccactccaacataacaataggagatatccatccgttcaaaatcagttatcaaacaactcatagttggaggaacgaccttacggcttagagcatctgcaaccacattcgccttacccggtgtgtattgaacgttaagatcatagtctttaatcaactctagccacctcctctgccttaagttcaaatccttctgagtgaagatatatttcagactcttatgatcagtgaaaatatcacaagattctccatacaggtagtgcctccaaattttgagagcaaagaccactgctgcaagctcaagatcatgagtggggtaattctgctcatgcttctttaactgcctagatgcataagctataacattgccctcttgcataagaacacaaccaaggcctactcgtgaagcatcggaatagacagtgaaacgtttaccaggttggggcaaagtaagcaccggagcagttactagcctctgcttcaattgttggaaactacactcgcattggtccgtccactgaaacttcacatccttatgtgtgagcatcgtcataggtttagtgataatcgagaaatccttcacaaagcgtcggtagtaccccgccatacccaaaaaactcctcacatccttaacattagtcggcctttcccatccgacaacacttaaaactttgcttggatcaaccgagatatcttgctgattaattacatgccctaggaaagccacttcaggaagccagaactcacacttcttcagtttagcatagaacttgttttctcgtagggtctctagtaccatcctcagatgacgctcatgctcctctacatctttggagtaaatcagaatatcatcaataaacaccaccacgaaattatctagaaaactatgcaacatgctattcatcgcctccataaaataggccggagcattggtcagcccaaaggacattactctatactcataatgcccatacctcgtggaaaatgcagtcttctcaatatcctcttctcgcactcgaatttggttataaccagattgcaagtcaattttagagaacaccttcgctccctttaactgatcaaacaaatcttcactacgaggcaatgggtacttgttcttgattgtcgcagcatttaaggcccgatagtccacacacatacgccaacttccatccttcttctcagtaaaaataacaggtgcgccccatggcgacacactccgtcggattaacttcttagataatagatcatctaattgtttcttcaactcttcttggaaaggacgagctaaccggtacggggctctggagataggttgtgttccaggaacaagatcaatacggaactctacatcacgctcaggtggcatccctggcaattctgcgggaaaaacatcaggataatctcgcactacaggaacatcttcaatcactaaaggcttggatgacttctcggctaaggcccataataaccccgtctttacagcacgctgcccaggaaataaccttgacatcacgaaaagagaatgcggaggcgcgctcccttggaaaaccatctcctcgcctgatggagcttccaaggtaatagtcttccagaaacaagagattacagcatgatatcggttcaaccaatccatgcccaagatcacatcaaagagcggtaagggaatcacaattagatttgccacaaattcctccccatcaatagagattgcacaacctggacatactactgaactagagattataccccctggagagctgacttggacagatcgagagacctcttgactaaatagattagctcttttcgcaaactcgattgaaacaaagcaaaatgtagcaccagaatcaaacagaactagggcatcatgcgaatcaactgaaagtgtacctgtaacgacatccgggcgaccaagggatgaagctacaggcatgttgtagactccagccatagctggggtagtagaggctgagacctgctggtgaggtggagctgaagcagaaggatgcgccataggcggtgcaggcaactggagtggagcacgtggagcaaaagattgaggcatgggccaatactgtcctggtaatggtggtggtgggtaattatgtgtgaactgctggtaaggaagtggataagttgtcatcatctgaacggcaccacggggagtactagtggatgaacctgaacctcgaggatagctagctgtcgaagaggttgctgaataggagctcggcttttgccacttgatgatagaatttgggttacgcttacataccaactccatgtgtccagctttgccacacccacgacatgccccagtaaacccacactctgctgaatggtgattctttccacacttaaagcaaattagtccttgccctggcacagggcgaatcaactgagactccgttggacgtgaagctgcattaggctgagaaccccactgcctaggtttagatgatggttgagtgacctgattttgtttgtacttcttgaaatgtggtcgctgcgagttctcacccccttcctaatgagctctcttctgctcattaccagtgacattaccagaacgattcttctgcgcagtagtaatttggagctcaacctccatccctcgagcctcctcaactgcattgaggtatatggtaggcaggtttcttcccatcacttctctataccgagcattgagccctcgaaagaacttcctagccttctcacgctcatcacttgccacgctaggcacaaagcgtacaatactgctgaactcccgttcatactcatcaacggtcttgcttccctgttggatattgtttaactcatcactcatcttgtccctaaatgattatggataatacttagctctgaactgctgaagaaaaacttcccaagtaatagcaccacgatcagggttccacgcttcaacaactccatcccaccaaatgtccgcctgaccagtcaactaaaaaggcatgaaagtaaccttctcctcaggagtcattctagatcccctcatatacttctccatcttgcgtaaccagtctgcagcattaacgggagtaccagacccatcaaatgtgtctaagcgcatggatgtccatctagtgagtgtcatcccctgagcagctcgaggagcatcatcagagacagcagctgagtggctaccaccctcctcctcttccatgtgctcatcctccatctggttcgaggatgctgcctcattatggcgacctctaccacgacctcttccacggcctccagcacggcccctaccacgacctccacgattaggaataggggattcagcaaccgagttgttcccaacctcttcattatcctgagtattttcaacttcttcattatggtggcccctaccacgacctctacctccgcctctcccgcggcctctgttagccaaccgaacactcactctaggtggcatagctatatcaaacacaagcatttatacgtcattagtttaacaataggttagacaatggcatgcaaggaaacacaatcatacacatatatatgcagcagaaacataaatgctaggaatgacccatgctcccattcctattgtgcaccagtgtgtcaagttcttttagatgtttatatataacccaagttctactcttattatttcctaccctaagagaaagtattttttttaattggttaggaactctagttcaaaattttatgttgatttatatatctcattacccagtcacttcccatggacctaccgcccgctctgataccaactgtaacaccccaggtaaccacgtacatagaatgccacaccaaaatacactcaaaaactaagtcctaaaattattagaaatttcggcagagtcacccctaaaaatacggacatcacgacaggcagttataagaaaggtcaataccgatataaaccacacaatccaaaccatcctagctccacaaatcccatgtgaaaaataaggatcagaaccttaaatgacctttacaagttctatgcaaaacttatgctgagcaaaaattatagtctaaaactaatttcaattgtgtgcaataataatgtgtagtccaagggtgctactcccgccccatgccgatcgatgtcattaggtacctaaaaaccaaattaaatacaagagtgagtaaagaatactcagcaagtacaatcttgaactagtaaaacatacgcatgatttatgcattaagaaaccaacatgaagggttggatttactttatttttaaaccaaagaagtcaaaagatagtagttccctcccggacaggtgtgaatatcctcttagcattaccggtaagccgagcaagcgtgatcagcgcttctcaaggatcatgaataaagatccaaattgcactcccatggctacgcatggttcttgaataatgtaaacagaacattcggaataatgaaacatgaataacgtcatgaatttgaatatgggtcgaaacacgaataagtagcataacgtcatagccatacaatcagtaataacaagcaattgaataataattatgcaagtaaagccaaacaaaacaactcagttttgtccatcacataagtccgtcttgtacttgccttaactaattcgatactccgactcaactcctccaacgttggaaccctccacacctgtggagcaaaactacggataaaccactatattcaactaacgatggttacaagggatatttactaaaatcgaaacctagaacatataaaccttttaccgatttgtattaaataacctatagctgttccattactgttttatgagtaactcacaaaccgtctaacggaaactagcaaataatacaacttcggacatctagacaaaattgtctacaactttcatgttgagcacaaaatcagattatgcctctgaaaatcccagattaaggaaaaacgaactgctgtctgatttccggacccggtcagcagtactgtttttgctgtttctcctaaaccgtttatcggaatcgagtgaaactagtaccgttggaaagatattgacaatgactacaaactttatttaggacaactaacctgattcctgatggtttaataccagatttgaaaatacggtttcagcctagcgttcgatataaaataaattcgaaaaaaccggaaacagatcgtcttaaatataaattagaaacaactatagactaaaacggattacctagcagtactaatgtataagaaaaacgaagaatttggaaatattcaccaaattccccaaatttcccttcttctatcaaatttccccttctttccctccttcctgttcttttctgccttctctccctccttcctgttcgttgcaggccaacagcagcagcagcagaaacgaatatcggcagcaacagcaagccgtgcaccaccagcaaggaagagatcagatcggcaacagcagggttcggcagcagcagggaaattaacagaaacaacagtagctcacaaacgaccggctgcggacgacgacggctgtggcgaccggcgacggctgcaccagcggcggcaccggcgaagagaggaacagcagcggcggcggcagagcgcaggaggtgcggcggctagggctacaggagaatcgctcctgtttctttttttttcgtttgtttttttttggttggttatataaagagactaaataagatctaacggctcacatctattcaatcctcgggacttcgttcggactccgattactataaatttatagtctatttttcactactcggcgagctctacgcatccacggttcccgatcgcctatacgaacaatggtttaaaagttgaacttttgcgcgtttgctctaatattccgcgagatatattaatttaaaactcggggtattacagttaccgtcgaaactttcatccaaattgccataaatgcccttagtaaatgttgatagcgaaatctaaacaatagttctgagcaaaattggggctgacagggcccaattatcaacaccagtttattttgcctccataagcggtattaacgctggtttcatccgacgtgatgcttatgtgatattacaattagaaaaatagatcatgagtcgcacatattgacgacgcactcctttatctccctatttcattcctccccattctccctcttctctccaaatgggcacgccatggagctcctcgtgtggatggacacacaaaaaaaaacttgtataattagctggttttgatgccatctaacctatatcccaagcatgcctcgtaaggctttctatttgtaaatggctttttttcaccttttaaagttccaaagctattgagttgattgaatgaacattatgcgaagcatatcatttgcaatgttctattggcatacctattcataattagaaatcctttagtttttttttcatttttaaaggtaccttattttccattgacaaaatgctagtctgttttctattcacaaacgggaagtccgtttggtttggctctgtggcattgattaagtgcaaatgtgtgcaactggaaatggaacagtggagtacaagctttcatccaaaaataccttaaatgccctcaattattaataaattgatagcccaataatttaaatagtgcctaatgaagttgtggaggaaggcgaaccaggcaagctgattatgatgttataaacatataggggtgctaactttttagcttacaaaatttgagggttcagtatagtgggctgaatttttattcattttaaaccaaaaatataggtaaggttgtaaaaagaacccatatttttgaaccaatacatgtgcaaccccttagaattggatagggagcatttcgtacaatttagtttgggtgagttttgatcggtattagagttagaataaattaactactcaatatctcacaaggtaaattggccctctttataagaaaatattgtctctatgtatgctgatgaaacataacactgaactgatgagaaacagtacatgtagtagggaggtaattttacctgtattgattatttctgaatatcggctaactgtaataagattgtgctgccttttacttctgccaaaaaaaatagctttgttgcctatagaagcgtgaataaggcattatatatcttaaaataaatatgtcaacacagcttaatgtatcacaccacatggctgactagcatttctgatccaagattatcattatcggggtttcctctctcccctgggtcgggaggcgacgacccagccgccccctctcttccacccctttcactatactggagaaccccacatctctcccggttcgcaacccctttactcccgggtagcgaaccaggagaaggaatccgggactaaagatcgcagtctttagtcccggttcagatacccgggagtaaatatttatctttaaagatagctgagccacgtccggttgatccccttttctttttttttaattgttaatttactactggcagttaatccctgtattttctcgcatcgggtgagaagcatatccccaaatcaaaccccaaatcaagtaacatcccaaatcactcacctcacaaatctaagttacacacaaatcaaatacatcacaaatccttaaataaattacacacaaaataaaaacatcacagatccatgcaatgaatcacaaattctagaaattatacatccagggaatcacaaatcacaaatcacacaaaaaatggaggacgccggccgccgcctgcgtgcgcggccccaccaagcgccctccgccgctggccgcccgccgcgcgcccgtcaccgctggccgcaggccgcctacccgctgtcgccgccgccagccgcctacccgcgccgaccgtcgcttggcccggcgctcgctcgcatcggccgtagctcggcccgccgttcgccgctcgcttgcgccggcctccgcctggcccggcgctcgcccgcgccggccgcggctcagcgcgccgctcggccgtgcagagggatgagggggagtagaggggaggaggaagggaagaagggggaggaggagaggggaggggaggaggaagagatcggatctgaggggaggagagatcgagagaacttaactgatcttatctaggacttaaccgatcagagatgggagagaaatatttactcccagttggtaactccaaccgagactaaagataaatctttactcccgttggtagtaccaaccgggactaaagatctaaatgatctttactcccggttggtactaccaaccggaattaaagtggtaatctttactcccggttggtagtttcaaacgagactaaagatcctcggccccctggtaggcttctgacaggggatgaaccgagactaaagatcaattttttttaactgggactaaaaacaatctttagtcccgattcttattagaaccgggactattgtggaaatcgctcgaccctcgaaagatcatttctccagtagtgtttcctccgcctcgccgtcgcccgagtggccgccggcaaagccgcgaggctgcaaggacggcggcagggggcttctcgctccccaaagttcaggcggtcaggggacctgccctggcggcggcggcggtgaccgccagatccatgccgctcgaccggatctggtgggatggcgatggcggcggcgacggggacggcgacggcggcggggttggtgacgacgaagatcggggtgagcggcgctgggcggggatgtgggcgatggcatcagggatggcgacggtgttagagcggcggcggtggagtccacgaatccggcggccagcgacctgccccacatctcgcgcttggccagcaatggtggtgaggaggacggccggttctggctaggtctagatccggtacgtcctcggtcgggtcgggggtggcatggaatccggtcgttgtgcaggtggtgtgcatagtgcatataccttcggtgtgtaggtgcaggtgatatttggtggcttccactgtaggtgctatggttgagggggactccgaggcgaaagccttgctccgcttctggtgctagcaacggcgatgccctcgggtgccgttcaccttcttgaaggcgttgctattggagccctcgttcaacgccactaaaggatatcctctgggtgaaaaccttagattcgttaggatcggacgatgtcgccattctttcggcgtaaccttcttaaaggcttcgttttaggagttttctcccttgttggactgctgttcttaggatcagtacgtcaatgtcagggttttcgccggttttcctttaattaaccatgttgttgtaaggtttttagccccggttttccttataaactggatcaactctcttcttctatagtaaattgcaggaactccctgcatgtcccctgaaaaaaaaaaacatggctgactagctagctgtgtatgtgtacctttacatgtgtaatctgtgctaaccccactatcgcaagcctgtttgagaatactaatttcgatctgcagaacagcagcatcaaagagatgatgagaccggtgaattcgatgagataagctgggtttcgcgtcaggttgcaggcattcctactgatgtccctcttgctaatgcagatgccatttgattctgccttgtacgcttgccatcggcagctttggagacagggagacgcatcatggaggccatcatcatctcttagctccaagcaaatcaacactgtctcgtcgaatcctatcaattgtttgcattacaagtgtcattaccagagctagagatcgagaggcaacctctgacgagcatacatatcgatcactgtcgttttcttttgcttgcacgatttcattaatttgatttggagtttcgtacgttttcaggcggcccgggcgggtacacaacgaccctccttgttgctaggaatttgagagcagagagccaaggaacaaaggatgcaattgttattgcatggagcaatattggatgtaaaggattagcgcagaattggatgcctatgtgatcgagatcatgtggaaattagtatcagttgggtccatgtattttggttttatttgaagtttgtcaagtgtggatcctttggacgattgtgcgtgttttacttgtattgactaacataagttaggtcatgaaaatctaagcatgtaaggtggttatttagggcttgtttatttttttcttttttgtcgctttcaaacctaccaaattttggtagatcaacggtgtcaaaaaaaaaatggtagatcaacaaaccaagcatatattatcaatgctgtcctacttaattttggtaattctagaagtttctactcttaacaattatgatgaaatcccttctttcaataaagttaaggccaaaagctcaaacctcgtgcttccacgtcatcatcaaattgtgaaccgttggatgaatgcattagatcgcttttcaaacgttggatagaatgcagcatagagcccaatccattagtcaccgggtgagtctcttcgcctccttagtgccaaatgtagcccatataaacacaatggcccatctccacacacatctatatgtatccagcccatcaatccgtataaaagagctttatggctgaacaccccttcagttgacatgtgctacctaaattatctacaaaattttggatagggctactaaaaagaatttctccaagaaagctatttgtttttctgtttctccttgagattatacctcctatctaataaattaatgttaaccaaatcccgcagcaacacgcggggcatcctctagtttggtaaggcttaaaaccaaacatatctaacactatcaaaatttaatactaacacaaaatatgtcaaaattttggtagtgttaaaagtggttatgaagtgaacgctctgtttctgttgatgtacatgatggttggaactatgacgaagattgagactatgcccattgaaaatgcaaagatagaagcttcaaactagaagataaaaacaggggctttccaatcttcaaatcattttgattggttgaatttgtgccaaggagtagaggaggagcgaagttatagtgaatgtagtaacaatttatgatttaagctctttgtcaacaataacgactctgccagagtttgttcagtcaattcaattgaatttacaccgaacaaatataactgtactagcatgactttcaaacaagaagacattattttaaaaaaacgaaccatcagaactaatttatttttaagataatggataaaaattcgccaacgaaaaaccaaattagctccaaaaattatctacaagagttacccacggtcgccggctcgccgccgagcagtgcagtccgcccgacgccatgatttccatcctgtccacgtcgagaagctccaccgtgtttgcgcgttgcctcgcctcgccggcggcagcggcggcggcggcggcggtgatggccgctggataaagcgggcccaaaaaggatcgcggtgtacggtgcggcttgggccggaacgggattgcagcctacgtgagtcctataagtgttgggccggaacggcgttgcgtttattaataagtctatttagcccctctcaactcttgccccgattcagtcagtgggtatgagttgagggacaaataatagacttatttcttatccatgcggcccatacatttgggccgggacgggattattgccgcctccgtgaggcccgtgggccctggtgatttgacaggtgggctgggctacaacgagcctgcgctgcaggccgcctcggcgtcttcttctccggctctctccgccgccgtctcgtctccggcgcgcatacggcggcgagtcgccctggctggcggcgatggtgggggcatcggtgatcgtctccgccgcccgcacgcctcatgctccgccaccacgaggcatatatcgagcgcgcattgcgatttttcctttacccttctgggtttttgttctagctaggcaaggcagccggctaatcacgccgccgagatcgccggagcccggaggccgccgcccgcgtaggcccgtctccacccagcgtctcaactggtcgactcggtggtgatgctccaccccccgcctctgctttctcctcccccgctttcatcgaaggggtaaacgcggaaactttttttttttccttttgtgaatacactgatactctcttgtttgcttgggatgatgtcgatgcatttgagtttgcaacttctcaaccaaatggggaaacataaaacattatactttgtggtaatggatcttggtaaatgtccattcctttaggttagtttagtgcagttgcagtactgaaccattggaattgggatttttcaggagaggagctgtttgctgtgagtctctgaacttgcgtgctatcgaatgcttccatcaaaacagtttgtaggttacaagcgaaaaaacaaaaacaaaaaaaactgtatgtgcagttagtcgatttacatattcttcctgcaaatgctaaatggttcatggttcttatattttgttcagtaacagcaccctgcatttggctgtgtacaccccacaaaggtgtagaggccgggtttgataatcctttatctaaaaaaaaacagcaccctgcatgtgtgaacatcatgaagctactcatacaacctgaacctatgctgataaggcttcggttgctcggctgtaaatatctattatagcctggggattattatgccaaattattcagagatttgatgcttcaacgcagggacacgctaaacttgtcttttgttctctgcaactctttcaaagcatctccgatatgcatgcgatctgctggagattcctttgagcaggaaactccaatctgcagaattgatatgatgcaggctattctcgtgtctctttcttttgccatctgagtttctttcttctccatcattgttctctgatagtaagtgttggtctgcaatatcgatcacattgtctggaagtgccatctttacataattatgaaggctgagagcttctttaaattcagtgccagttggtctttttccggtaaacatctccagcaacagtataccatagctgtagatatcacccagaattgaaacctcattgcccaaaccgtactctgtaatcataagaaaatgttacataaaggaaattgttgcaagtttaagcatttatatttaaatttatatgtaggcttcagtctaataatatataatttacactgctgcataattatcatttgcaagaatttgagttttttcataacaaattgcacacatctgaatagcaaaacgatctacttaagtatggatcaatggaaaggtttctgaataaattagaaagaaaaccgtggattgtagctgttagaagcatacctggagcagcatatccattcctctcattgtagcccagccacttgatttctctaacatgtcactatggtcttgatgcaggactcttgcaagcccaaaatcaccaacgtgagcaaccatttcactatctaggaaaatattgcttggcttgagatcacagtgaataattggcaatggcctatgttggtgaagataatcaagtgcagaaaccacatcaatggcaaatgtcgagccttttgatgatatttaaaaccttgtcttccccatttgttttgacagcgcaaacgaaggaagccttagccacttctactagtggttgggaaccttcccctttagcacacaaagcgaaacaacggtttagggcataataattaagtattagctaaaaaatcttgaaaaatatattaatactaaaagcaattttcttataattttttttcaaaaacactgtttagtagtttgggaaacgtgtgtacgaaaaacgaggaaatagaggttcggtaagtgtagggaagaacacaaccttaataattatatcctaaattatgcatatagacccctatttggatagcaaaattttcaaattagccttcctcatctcattcccttgctcggtcggtgatctgaaccaaaactctgggtcgcaaccaaccatcaaaataaaggacgattttgcaaaatgtattaaaatgagagcgtgtgtgtgagagagagataatcaccgccgttggatcaagcaggaatggttcagatgccactgccccaatccttcctggccagtcgccgccttacgcggccttgccggaagtccagccaggagcaccgccacattgtcggagccaccacctccccctccttcccgtcgttcgtagcacccctgcatcttctcccggatccatcatcctatcttcatctccttcccgaacctctccttgacaatggaagcaggtgtcgagtacatatccttatatatttacattgttcaacattatctaaaaaaaaactatttacattgttcaaatcctttatattatgagacaaacaaagtactcagttaagcggagatggctgcttgttcaaatcctcaacgggaggtggctgcttgcaccttaagcggtaatccttgagcatttgttgccttcttctcagttactacttgtttgcttttgatttgtgtcgattaataaatggagaattaatcaggtaatgataattaaaataaccttcttatattttttttgcaaaaaaaataattgtttaataattcaagaaacgtgtgtgtgaaaaatgagggaaatgagggagtaaaaattaggaagataaagagccgaacacatcctaaacattgataacaactacgctaattatggttccactgataagccggaaaaaaatactatactagtaaatctgttatgaacacaacacaatgtagagaacacacaaggcacggggttttcgcctgaaattccatatctccatctaacagtctaacagactgtacattttaacttgcttcacgttacatgttttgttttgtactacattggtcagtcagactaatgcctccacgtccagtattgcctgaacattatggacttcttcaacaaaagaaacaatggtaaactcctacagaagaaacaatcaaacagtgtttgctcttgatttgtgtcgatttttaagtttgaaatgtcaagatgcagtatacagatcaactccagtttctgccaacttaagagcatgcaggaaaccttgacagagagctcgtgtcctgaaggtagctaaatcatggtcttctggtgcatagctgctggtgggttcggtcatttgggtgagcttcccggttcattcctggcgttgcctggcgcgttgacggccaccgcatttgcatccgcagtctatcgtcgacaagcaatgtgaagatgaaaaatacttgttagagcagattaaccatggtgttagataattcgatatccatataggcattaggcaacgcagagcttttgctatggatttgcagatggatagagaagacgacgacttcccccgcaaaaaaaaaaaagagaagacgacgacttacaggagcttgcttggaggaaccaagatcctctgccatcggttctggtcctttatgttcggttgttaatctcttaccatgctgcagaatgtgtaaatcagaaagtgttagttcaacaaaagatcacacaaagataccacaaagtccaagctgcaagaatttcaaagggctccgaaggatgaacacgacgaccgaggttcgagaatttatcctgctctggcacttgatacaacaggtacaactggatgaaaacagggaggacaacctaatgtggaaatggaatgcgaatggaatctactcagccaactcggcctacaaaattcaattcactggaagcattcaggacaatcgtgttaacttcatttggcgagcaaaaacagaaaacaaatgcaagttctttggatggctcatggtccaaaagaaagttctcacgtctgacaaactccaaatccgaggttgggacaacagtccaacttgctccctctgtgggacagaaccagaaacagcgacacatctcttcatggattgccccttcgcgaaacaggtatggacaaacatttggttgaaactaggactcaacatgcctaggtcttcttccttcaatggaaacatgatggattggtgggaagcttgccggagagaaatgatcaaagagcagagaaagaattttgatggcctacacgacatgggggatttggctacaaagaaatgctagaatttttaacaatgactatggtacagtgttacatgtggttgactccatcatcaacatgtgcaaagccttcgatgaagcgcaaatcgtttagatgaaaaaacgcctacttttgttgttagtggctttgcactttctcaaagtgctgtaacctcctccaatgtaaaaatctgaagacacctcttggaggtgtccatgtacgtgaaactgcttctttctcctttaatgaataggcagagctcctgccattatcccctcaaaaaaaaaaagaatttcaaagggctcgtttcgcataaatgcaaggtatagattctaaataatttgtatgagactatgcacaaccaaaaaaaaatcctgtgagataaggaaaaggtacaaccaatgctgccttaaatttcattcagatgaaaaggtcaatacatctatggtaagcaaaataatttcatcagcaccacagtctttctccacaactcaacagcacaagagaatttcgctatgtttctagcaccgatatggataaagattataattcacatatagcagcaagccagcaagaacagaactctacaatgaaaacctcattgttactccatcaatttcatacttttatattataagtcgtttgacctttttctagtcaaacttggttaagtttgaccaaatttatagaaaatttggcaacatctaaaataccaaactagtttcattaaatataacattgaatacattttgataatatgtttgttttgtattgaaaatactaatataatttttctataaatttgtacaaactcaaaaaattttgactagaaaaaaaatcaaacgacttataatacgaaacgaagggagtacataaataagcacaaaaggggaatgccacttctttaaacaaaagggcgcatgttaataaaagaatggagtaagtatactgttagttctaatgattcaggctcagctagttctaaggattcaggctcagctaaaaaggagacatctcaaattaaaatggtggacgtcgtgtcttgaattttataaatgagacaggacagaaccgctcattggaatgaactgagaggagaaagtacctgatctttggtctctgtttcagtaatttctctctttactccgatgttgtgaataaggcttctaaaatgaaaatataacatgaggcagggcacataattatacaaaatttaatacagcttttaaaaaaaggaaaaatagataccttgctgagtgtcccgtaggtttgtgatcatccaacaccatatcagagtcagggtcgtgcctttcatctggatcctcttgatcttcatctggctgaataatgagcacatatgcacaggacacaaatacattcagtcagcccttgagttatcacttccaagacatcatttgcatgcttatattaggaagcctggagactcacctcaggtagctttgtttcaggaattcgctcttgaaattggacgctaggtgcatgttgaagttttgaaagattgtccagaatattgcattttatttcctccagttgcttgtttgtatttctgttctccatgttacttgctgcaacgtaaagactgtattctggaccaaaatattcataatactcattgtaaggcaacttctcctgtagctcttcaccaagtgcaactcctgtctggccaaataaaaaaccaaataaacaatcagaggataaaaccatagctgtagcaacagatgttcctgatataagactccagcaagcataaggcactgccattcgcacttgttcgccatgtttagcctgctgtgtgttcagatttataaattcacaaaaggaaacgaaagcaggcttgcaaggtccaaagagccaccagattttgggttgctaatttattaaacacacctttgatgaaagctaacaactgaggaacaggtggtggcctgaagcatataattttgcaagggttaacagttagctagtagcgttttccgggattcatcggaagtaataatgttaagcttgtctatgaaagctctattgtgccttgcctgatactatatctgttttaaaataaccaccctttaatgctttgagaaacacaggatgatttgttactgcacaagttctcacaaattaatgcatttgaatgaaacagagtagaaaataaatagattaagcattacatgtaaatgggcgataggtgttctgtgcatttcagtcatctgctcagcagaaaccaaaatcttagtttcgtgattgtaaaattacagcagcatggatcaataaacaaagccaggtagaaggtacagaccactatagaagacaagttcttgatgctgagcatcgaacacagttgaaacacaaagcaaattaggttctaacacattaccgagctcatggctttgctttatcatccataaacaatagaattaattgtatgttaaaggcacaaaggaaaaaaaaagcggggggaaagatatatatcagttttgtcttctgatcagattacatacctcgtaacaccagcagcgtgcaacatttcttatggtatatccaccaccaccaagaagaagcaacggaacattgaaagacctcatgaacttaacacattcagcatgacctttccctgagagattgaaacagcccaacctatcaccggacaacgaatcagcgccgcactgaagcacgactgcaccaggacgatacatctccatgactttgctgatgatcggcttgaagatggactggtagctgtcatcatcaattccatcatccagcgggacattcaggcagtaatacttcccttctgaatacccaatgtcgcggatatcccctgttcccgggaaataatccccaaacttgtgaaatgagactgtcataaccctgtttgttgtgtagaatgcctcctcaactccatctccatgatggatatcaatatcaatatacagaactcgctgtaaatatgaagacagcatattagtggtttagcacaagaagacaactagaccaaataggggaaaaaaacatctgatctgttttcaaactttcaactgttcatgataatctaggattgtctttacgcaacatccattcttcagatctgtgtaatcagtcacctcttgttctgaatacgtttcaatcaaatcaatctcttatcatgaatcgtccaatgaaaattctgtatgttgtactccctccgtcccataatgtaagcgattttgagatttttcttgcaacgtttgaccactcgccttattcaaaaatttttgaaattattatttattttatttgtgacttactttattatcttaagtacaacttttcgttttttatatttgcaaaaaaaaaaatttgaataagacgagtggtcaaacattgcaaacaaaaactcaaaattccttatatcggagggagtatatagctttaacagtatacatcatgggcaaatttaataacaaacacagcaagttcgtcgtcatatcattctctctctttggaacatcattatatcaactagaaatacatatacacattcagaatgattcatcaacgtacatgagcttttatccaggaaaacaaaaatctgaataaaattgttaatacataattctgcacgtgccaatatgccatactattcagacaatgtgtaatcgcgtaacgaatagtatagtatgagatttaagttgagcaaaaagttaatccaatttctgtctacagatagccatttcatttacatttacagatgattaatatttcctaccgatccaaaatttagcggaagatcgatcgaactgtacacaacaaaatcagagcaactggagagaaagaagtcaagatgatttttgcttccgtcttcattgacccacccaacttacacatcaagtaatctatctattcgaaaaattaaacaaaccacccatccaaatagtactactcctaatctattcgaaacattaaacgaaccaaaaaaaaacaagaaaagcagaaaaaaattgaaaaaaaaaaggaacacaggtacgagcggaataggatgacgtcacctcatggagcttgaggagctcgaggatggcgaggacgatgtcgttgacgtagcagaagccggaggcctcggacttcttggcgtggtgcaacccgccggaccagttgatggcgatgtcgtgggtgccgtggttgagcttgacggcggcgccgacggaggcccccgcgtaggtctggcagtaggcgtagaggccgtcgaagacggggcagtccgggccgatgttgaagcggcggagggcgcggacctggccgagctgggtctccggggtgacggcgcggaggaaggcgacgtagtcgtcggagtggaagcggcagaggtcgatgccgcgggcggggagcgggcggagcacctccatcttggccggggcgaggaggccgtagtgggcgagcagcgcgtgggtcatcctcacccggtggggcttcatcgggtggccctgaccgtagtagtagttgcccacctccgggtcgtagaagtagcacacccgccgcttctgcgcgtcgccgcacgacgccgacgccagcgagttgccgcccgcgcccgccgacgaggggtccatcgccgcctccgcctccgccgccgccgccgaattcggggttgggtttttttcctctctcgaggagctcgcgtgtgtgttgtggtcgggtgcttgctggagaaggaaacgaagcagaggaggcgatgccgcgatgggcgaggaggggaagggggggtttatatagggggcggagagatggagagatgaatggaagggtctagaagtatagaaggcggagacagagggcaggggagacggctgtgtcaaacaatgggctctcggcgcctcgccgttttccctgtacaaaatcaccgattattaaaatttaaaatttaaatttaaattttaataattttatgaattttcaatgtatttgtttatatttgttttaagtttttaataacgcacatataaaaattttgctcataaattattttttaaatcgttaataagttgttttaacttgcaatcagctcacgatcaatcagtggggccctagatattccatgaattaccagggtcaaggctaatactccctccgttaataaatgtttgacaccgttgactttttagcatatgtttgaccgttcttattattcaaaatttttgtgaaatatgtaaaactatatgtatatatgaaagtatatttaacaatgaatcaaataataggaaaagaattaataattctttttttaataagacgaatggttaaacatgtttaaaaaaagataacgacgttaaatatttagaaacggaggaagaattgtttagtccaaagctaattataagtctaaagtgatagtttttttatatgtgtgctcttagtaaagtcatttctaaaatataaactataatgaagacaaaatcaaccctaaacttaagtgatattcgaattttggttgtgacacaagttgcaacacaaacgatggagcttaatttaatttcttagatagtttttttttgtttctgcagtggtggttaacatattttttatttgatattgcgcaaggtaaatacggcgcgcatgatggtattggaactataggtttaagaaatattttgcaactataatttcctatacactataataaaatcacacaatttctagcgcaaatcaataactttgtagcccatatttttggctgacaggtagacgtagagtcatagactaaggctgggttcggaacccctcctccccgacatgcacaacgaagtacgtattattggatggttaattaagtattaattttttttttgaaaaatggaataatttgattttttttaaaataactttcatatagaattttttttgctaaaaaacacaccgtttagcagtttgtaaagcgtgcacgcagaaaacgagagagatgagttgggaaaagtgggataagaactcagcctaaggctgtgttcgctgctacctcttcacaactcctctccctcgttttccgcacgcacgcttttcaaaccgttaaactgtgcgtcttttgcaaaaaaaatttctacacgaaagttgcttaaaaaatcatattgatctatttttgaaaaaaaaaaagctacttatcactttccttttctctctccctcccccctctctcttcccctcttttctctcgagacacccataggccagccatgccacgccctccaccatcagcctgatagtcttatcggacatgaccgtgccacttgtcgtgttgaaggcaccctacatgaggtagagcgctggggggatggcccgttgagacagcggcgctgctgagtcgcgataggatgcgcaaggaacacatccatatttgtcatcgttgccgtgatccatgcacctcggagacgcggctagtgggaggatgggggtggtcaaagaagaggagtgctatgcgagggcgaggcgggcggcggtgtagaggagtaggagtgggtggtggccgccaccgccgtagccatggcggcgaggagatatgtgtaaacggtcgttaagtactattataataaataaatagagaattaacatttcttacacatatatcaataataaataatatagttgtactaaatttgaagagctaacatggatatagagattatacaccaaagtaaaacaaaaatgaagccgtcatgcacacctccgatgaatcacgtacgagaccgtgatggttagaccaatcgactattcctaccatcagaaagtcatgaaccaaaatcaaattaaatttctgtacatagtatatgcatgtcagtgtaatgccttgtttagttgacaaaattttttgtccctgcgtgtcatgtcagatatacgaacacacgttttaagtattaaacgcagtctaataataaaacaaattataaattccgccagaaaactacgagacaaatttattatgcctaattaatccgtcattagtaaatgtttttattgtcgcaccacattgtcaaatcatggcgcaattagggcttaaaagatttgtctcataatttacacacagtttgtgcaattggtttttttcgtctacatttaacactttatatatgtgactttatatatgtgttcaaatattcaatatgacagtgaaaaattttgttttgagaactaaaccgggcccgacagatatgcatagttgaaattggagatcgatttagacagcgaacgcggagtgagttgaatgcaagatatatagaaatgcgagacgcgactggagtttatggaagacacagcaggagacttcacttccaatgtttgaaatggtacactttattgcctaaggccctgtttagttcccaaaacaataacttttcacccatcacatcaaatgtttagacacacatatatagagtattgaatggtacactttatactcaaactgaaaatcaacagtactgaaatttcagacaggtatatatggctcttcctaccatgtgccttgtatttatagacatcaggctgcagtcataataagtaaagactacatgataagaacactactacaaatatagtactactctggaaaacctctatattaaataacaagaattgagcatttctgatagtgctacattctatgggggcgctttttaactagcagcctctgggtattgggacagcttacagatacaacagtgccacaaatctgcattccccgttaccttctgtttgtgaccaaaggggtacacatggacaaggcacaaggccggaacaagggctctccgtgaactgtgtgaatggggaaattgggaaaaaggagccaggcagcagcagtacattccgagccgcagaattgcaacgaagcaaaactgattccgaagcaaaactgatggccaaaccatgcctagagtatcctgaccatcgagagaggccattggaggcttcttgtcgaggatcactcgccatctccgttgccaaaaactccgacgcgctgcctcctcttatcgaaaactgccctgaaggattcaccttcgtcacgaagttgttcgctgaatcgcttctttgtatcggtgttgattaccccctttgcctgcttggaattatcttcagccaaggggttggaaacctgcaagcaatgggaaaataaattgaactgcccaactgtcaagggaggggcttcctgcatgcattatctatgggtcttcctgtaccatgtggctaaagcaggaaaaacaaccatctaataaacctttcagaatcctaaccaaatatgagcatgaggatcttctaacttgcaaactaagaaagatgagtctgaggctatgttcgaattagatgttagggcttgtgcagcataaaaaacgagacaagtcattaggatatgtttagttaagtattaaatattataaaattgaaaaatatatttatttacagaaacttttgcacaaatcacaccatttagcagtttcaaaagcgtgccctctataagcaagtgccagtgcccagtagacgaaaagaatttgcttaagccttgttatttactagcatgggttctacttctacagcagcttcaaccgcgcacaaaaaggcctctgctacatcatctatgcttacaggtttttaagagccaacgtgctgccccaagccctcaactgtaagcactgacaagaatcaattttcataacattagcacttggagaatgaatgtaatttttttattgagtatgcagatgaagaagtttctaaagttaaaagtgttaaaatcaaagcatataattgttttctctacatcgcagagccttttagaacattgtctgatccattattaatgactctcatgacccacgttttctgcaagaactaggataagatggcaaagagatacaaggatagaggatcaagttatgaaactacgtagggcatgcagaaagattaaagactgcgaaagtaccaaactttagtaataagtcaattagaccactgaccaaattgtaccctgatccgggtcctatgattaatgaagaagtgagtcttcttttagctgcaccaatagaaaaaccacccttttctagctgcaaggaaagaacagaaaatatgggaggctagttaaatgatgcataccaataagaagttgcagaaggacaataagggcatcacttgtcctcttctttttataagtatcatcaaatatgtgtttgtaatactaagtgagcaatcaaatacgattagttatgtactccatcccataaaaattgtatttctactaatgcaggaccaagcaaattaattacatcaaaatatatttccttgtaatatccattccttccatcacatctctaacttgttgtttcaactctcaacattccttttaattaagtttatatatggaatgtgtgtatgtattgtgttcattaaataaggttattgtggtcatttgtctatcctactaatctgtccttaattccctagaaatacaaggtagttgtttaatagtgattggtttattgcaatgacagaaatataggccgctaatatttgatattaacaaaatgcaagaaaacaatgcattttttcccttgaagcaaaaaggcatacccgatctccccaggtaactgtttttcgatgcgtgctgtaggtttgagccaatccagaaagagcatgcgtacttccttctgcatggtcagacttctcggtatcctcatcaaaatcttttgaccatttactctgtcctagctctttgtagccatccaggtcgtcttcttctgacgagtcccacttcttccctgctcctgagatgtctaaacagaattttacaggtctgacttaacatgtccttaatactttcactaagaatccgttatagtgtttcttataattttaatgcttaaggataacttccaaatcaaactaacagtctgctactgctgatgcatgcactacaatatcagaacagtgggtccacattcatggtacagtgaatagtacaagtttactattattgatattcacaatggcagggtgtctgttgcacttatttaaccatctatttcaaacccacagtgcttgttttgcaggggatttgatctctccacatttcatcagtattgccaaataagtatttggttgtattataagtactaactaacacaacagaacaagaaaaaggctttctacatttatgtgtaaagtaacttacagtatttcctcatagttttgaaggtttaaatgttacaataaattgtggcaaaggaatgccaacactaatcactgaagaataataggaatctgtaccttgatcatgtccattatctagtgattcagacacagccttctgtgtgttttcagcttcagtactagttgctgtgttactggccccatcagtgtcttctgtctccatatccacctatttgaagtacaatagattttgagcacatagatctctttaagtgactggtagggtagggatatactgatatgggatacctcttgaatggaatgctcgcgtagattgtcatcgttgaataatgactaaaaatattaatacaaaacatgaaaaacacgattaatcatgtatctaatagcatgtcttaagtcttaaccgccaatcatatgaatactatcagaaaacatacatggatgtctagtcgaagatatagtggtggagcctcttcccagtctgctgccatcttgttcacatcatctactgtaaacccatgcacattcctagcagcacagccctgttgttcacaagatatcacatcatctactgtaaacccatgtacttactggaactgaaatacattctcagatgtttataatatatggtgtaaatattggtaatataactaatgggagtgcaaacaagattttttacagcctgatacatatatgaatcaaataaattcaatatgattttcccaggactgcctagatagcttatagttaagaaaacttactgttggatccttgtatggtgcctccagcaggtacacttcatagcctgatttctacaaaaggaatagaacagtgaacttactttcaaatgactaccaacaagataaaatgattcagagaataaaattccaaagaacaaggtataggaacagagtgcctcctgaaatggcaaggtataatccaacaaaatttgcacagattagtctagaagttacaatcatatgaaacggtcacttgtcatatgggcatatcatctaaattctaagaagtcaatagtgccattaaagtggaagtcaaagatgctttggaccaactgaagcatcaagaaccacacggatacacaaataccgaattcattttagcaactcgacagttgattcagggcatgtaaaacaagcagataaccaaaaacccttgaaaataaacgagcaaaaggtttatattattgggcaaaccatgtaatattgaaagaaagcacatatatgcagttaattgcatacagaaaccagaaatacagctagcgataagtctgcactaagaaacaaccaaataacccctctggtgtataggtacattcaattgcagcaaagaagggagagaagggtccaataaactggactgccttagtgtcttagtggtaataaatgcacagtgctattaattaaggctttgggacgcgaattcttgtaggaattatcaattccagcaggaataaagaaaaaaatggtttccaaacagggcattaatttatgacagttacttaatgctatgcctctcatactatccactacacatatgtcaagggggtgctagcaggataactataatattccctccttttcaaaatataaggcatgttttgtttcgttaggacaaggctgtgacccacaattgctctattaggatattatttatgtgatacagaagcataatcataattaagtgcttttgaatacgaatctaacaaattcaatttcgtgtcacaaaaattatatcctaatagagtaattgttggtcaaagtcttgtgctagcaaaaaaaatataccttatattttgaaacaaagggagtagtattaagagaccattaataaaaaaggaaagagaaaatagaagattcgtagtgtatccaagataagttaatagtgttttccagccttataatttgcactaaagtatgcttttcaagtgcaggccacctcttgttctaaggggagaaaaagcagaacccctcttaaggattcaaaaccttaacaaaaagctccaacaagcaatgtaaattctcacagttgacgcaacagagactgagagtttaccttcgcacttgcccaaaattgagcaaaatcagctacccgcagattgcggtcatccactaaaaacgggcagggataccagcaataaacaagtcagttaccacaaatccagcatcagccattgctaagaatgaaggcatcacccggtacaatgccattgtaggcctgttgcttaattgaatgtttcaaacagtacaaaacataaaccactagtacaaatggatgtcctgtcatcctcccaatgtctaggaacccattgcctatgtcctaatcccagaaaatggccaccaaacattgaacttaataagacaaagatccaatcatgaagaaaagccaatagattgaaataatatgatgtcaatgaatatatgataaagtttgcatagggctttttccgtactcaatgaaatttatgataaataatgaggcagaacataatcataaccaccaaagtaattaccaccaccatgaattaaatcattaaatcattaattcatcctaaagcaacaatatttaaaataactcataccaatcacaaatgtaaaattcccttcatcaagggtcttcttaaatgcgttcaacatgcttgatctgtacgtctgtccaataaagaagaaatttagcaaaattactacatcaaatgataaatagtgaaatacatgaaaaaaacaattactcatgctgcaattatcgaaaatgtgaatgatggacaatactcccatgtacagtatacagattccacaacagaaacacatctatgtgggttatgaagtatactgcagtctgggagatcatatcctttcaacatcaaaatgcccagtgctgcaacttctaggcgatgtgctctgatattgttatttaaagtaaacctggggaatgtgacatttctaaaggtttacattagttctaatgagtaaagactaatttttcaggcaaatgaaacagtttgccataacatagctccaataattggcaatagcattcataataaatgagataaaggaatgaagtcaaacaaaaactatttcatcacctcctccatctcaggctcataacagtactcgatcactttcttggtcagctgctttcttcctttggatgtactagaagattttgacccttcattgtcttcaactttctaagagcattaaaccaagttacaagacagaatacccatcaaataaaacagaaatgtaataagcaattctgagtatagtgtgacaaattagtgtacagggttcatgataggttctgctattcttcaactgaccttctcaacctcaatcatgaaatagtcatccatcgaatgaattctaggtgcatttccaccattctcaacttcaaggtcacgcaatgcctttgcaagatagctctttccactacctataaattgtaacagtggtaacacagatatatatatgaataaattcccagagtaaaaaatattgacagtcttgcagactattaaatcatgatcataatgcttgcgtgcaataagaggaaaaaaagttatgtatcaaaatcagataaaaaaatgttacgagcactctggacagtagacaatgtctacaatcttcatggtccaatttgaccacaagtttctgatcgtctactatgatatgcttgtaaaatgttacaagaataatagcactatgaaagtatttcaaccattggtttattattgatgttattttagtagtttgatcaatataaatgcctctattaagatcatgattgaagtcagatgaagcagtgtgcatttctagaaacaacatatatttatgaatggaagagtagtaaaagagcttatcatgtgtattgttttgtgaactgaaaaaataggcatttgataagtataaaagaaacatcagcaactcccaggtgttatatgcagagaaggtcagatcaatctcaacaaacaacaggtacagtaaagctaccacacaaaagatgaacgctttttgaggcatagtataacaaaattagtctaaccaagcgctgtggccactggctagcatacaaaactgtcaacagtgtcggcaatgttctttggaatgcttaatcagccatatgggacataaaagtggttgtgagaaaacctggcagcccacggaggatgataacaatatgatcaggccgtgacccacgaagtggctgcttgaacaagtcacaggcactaattacactgattttagcattgttgatggaatgctgagcttgggtttgccttccacctcctaaatgttgctctaagtgtggttgatatgccaaacctggtacctgaaacattcgtacaacaacaagtactgctttctgagtgcccgggaaagtattgaatcataaccagtgaacacaagttcacagagagaagaagataaacctcattgtggataggtccattgtaacgatttgcattaggcatcaggtgagcttgatgcaaagtatgagaactaggtgggcgcgcagttgcggctggagaaccggaatgaataggaaacaaagatgatttcacagcctgcaaaggtggcttggcatggtaatctgaggaagacggtacaggaggctccagtggtggtggtggtggtggaacatccgcctcaggatgccaaccgtgggaatcataacggcttctcgcctcagggtatcgagccggtggagggagcggcggcgcaacaggcgattccgagcgttggaagcgattgtagcggtgatcatggttgaaatacccctcctgaggtcctccaggcacaaaacttgaacctaaggcggcaagcctttcatgcgcaggtggaaacctcccggcgtgctcgtaatcgggaaaactgccttcatgcgcatagggattgtcataatttggaggaggaggatagcctctccctcctccatagccgaaccgatcaggaggtgggtacggttcgccgtgcaacatcccaggcggcggcggaaacggagggcggccgtgatcccggatcaagccgagcagccggtcgccctccacgggaaccatccccggcggcggcggcgggggcagcgggggaggcatcccgtcgccgtacggatcgcccacgcgcatccgcttgtggggggcctccatgtcgaggacctcgtaggggtgcggccccgggggggcccacatcggcggcggagggtggaaggggacgtgatactccggcgggggaggaggaggaggaggagggtggaagggggcgtggtactccggcggaggagggggcggaggcgggtggagatcgtaggggaaggggtggggcggaggcgggcagaaggggaagtgcggcgcggcgcagaccgggcagagctcgtcgccggcggggaaccgccatggatggtccatgggggagatggtggcggtggtggtggccgaatggggttagggatctagggttttgggggaggaggaaggatcagggagcttcgagaagattcgagaagcttccttcctgggcttggggtccgcgggggtggacggctgcggcgccgcccgcctcgtctgggtagccagaaaaagcctatggaaccagaagggctatattggaaattgacgtcgtgcggtgccatggttattccgttttggttgttttgcacgtataaccctcccaggttcttaatttgtaaaagagggctgctcgagaggacaagcccttgtgaaatgataccgtgaaaacaaagaagttgttcaatagtactggtagaaaatgtacgagcatagacatcaattgcgatgttttaggtgtgcaatgtgtgaaaatgttactgtaggagacaacgatttcatattgattggctatagctgttgtggctagtataattgtgctaccgcctgccgccaacatatgaacaatctaaagaagaaaaagtcgtaatagcgttgtaacgttcaaaattagttctttttgccgaagtatctttgctactatgatgcaatgcttatatttttgaggaaacccacttagaattcatggttttttacttgtttaagctagtttgaattagtatattctgtaatattctacaaaatttgagcgaaagcaatatatttggacaaattgtgatgatttgatgaagatcacattctaaaacaaacaatcaaatatacatggttgttttgttaatattataaattctagtgttaccaaacaaatttcaatacttcctctgtaccgtaaagcatgacgttttaaggtttattacccagattaatgtctactaaaaatgaccaatttaccctcattaattcaatttagctctgatgtgcatgcactctagaaggccccacagaataatagatattgcagttaaatagtaaacgaagcacaccttgactaccacgtgggatttgcataaacacattagagccatggccataaaaattacacatgagaaaacaaccattaccatagtttaaacatttgaattagcctatgtagtatgtgctttggtgcctaggaatgcccgtctatttctgaaagtgggccacttctttgattatggccaggacgatatttttcctgggacattagttggacgggccgggggaacgtccaaacttttgggataacatactttctccgtcccataatataagtgactttgaggttttgcttgcactgtttgatcactcgtcttattcaaaaattttagaattattatttattttttttgacttactttattacccaaagtattttaagcacaacttttcgttttttatatttgcataaattttttgaataagacgagcggtcaaacactacgagcaaaaactcaaaatcccttatattatgggacggagggagtagtaacaatattcaacttgcttcaaatcaaatactcctcttatacttatatgtaaattgaatatattcactgacaagatgcaaaagtatctagtatatgaaatttataacttctgcagccccataactgcaaatttatctccccgttcgaagttcccacgcgaaccgttgccgtgccgccgccgccgccattgacgccatgggagcagcatctccgcgagctcgctcgcgtttccaatggcagacgccccgcggccaccatcgcctcctcctcgtggaaagaaatcatcagagctcgtctccgacaagaaaccctcaccgcctactcctccagcctccgtcccgccttcacctaaccctgcttgctcaaggccttcacctagtcgagctccggcccgggacgaagcctccacgatccaggtccacgcccgcctcgccaattcgggctttctcctcctgcgcctacgctacgagctggcgccgaactcgcgagctcctccgcctcggggtcgcgcgcagggtgttcgacgaaatgccgaagcggaccgtcgcccgcttcaacgccctcttcgctgggctcgcgcagcgcggggaagctgatgaggcgaggcgcgagtcttaagcccctccgggaagaagggttgccagccaccgagctctgtcatggctgcctgccttacttatgcggtggtcaagcacggggagcagttgcattggcttggcttgtttgaattgctagcgttacaatgcgatggattctgggttattgaggaatgatgagcacaccatgcccttggatactgttggagaaatgatatttgggttcagtgaagaacctaatgggaatgatttcgctggtgttctcagcatgcacaagtttgtcagcattgtcacttggtaaacacctgttgtcatgtatgcaaggtgcagttagtgcttatcggcttttatcagccgtggaggaacaaagcttggtgtcttggaataccatgatctcgggttttctggcacacagggttgttcatgataaacagaaggtttcaagcctgagtgccggacagttttacatggaacctgatgattaatgggtctgcagactgtgcacaccacgggagattgtccaggtcttttcatcttttagtaagatgcaaatggagggtttttcttttcctcgagaaactggcaggagatctgccttgatttatattaagaagaatatcaactgagtaggttcaaattacgtgtcctgatacaagaaccgaaagaaaacaactgttaggatctaattgatgtacataaatttctgcaggttaattctcgtcggcagagattggcaactccatctgtgtgatgttctgaattgccatgaaggcgatttgcagttgtctttctgttgctgctgaaagattcttctgttcctctccagccaaatattctgaaaaaaaacaatgacaagtgtgccgaatgcttgttcagccttatcaattttttcggcaatgctgggagttcaagtatgatgttttccaaacaacagcaattgacatgtttgttgctaatcatttactttcttctacctagtttgatcattaatggataatttttttatatatttattggtttacatttctttgtattttcttggcaggaaagttgtttccaggttgcaacactcaagagtaggaatgtgcatgaaagcctggtcattgcggggtgacatttgatttgaatttgcaccatccttattccctcgcaagtaaagatggtgccatggtaccaaacattacagttccacaatatcaagaacctgatattaggttgatatgctgcgtacctgtgttaaactctcgtagtgaccttgtgccatctcagcagaattagttttgagcttgcattttgccgcaaagccatgatcaagattgaccctgtggtcgacacgtgtcaagtggtgggagcaaagaaccacatgcactgtggaggcctagaggttcgcactgtgagtgccgctttaggcatcactgagaatgcaagctggagatggagaagttaaaatcaaatttgtcatcttttgcgagctgatggtcccttgtatcagtggaggatgagcccactggttttgctgggaatgttctttttgcagaatattttagtctgcgccgtagcgtgtgatctgctgagtagaatatactgcttgtactacttttcttagccacagtaatgatagaactgtaaggatttggtggatttacctgtagaatttcatagtaatcgacaaatgatataatcggtaattaaatggccttcaaaatcgatagtgttgtctattgtcgcatataacattataaaatgtacgttttataatgtacaagatgagtgtactgtatcttttacacgccagccatcggtgctaactcattttgatctgtgaacttaaggcaaacgaatactcgtaaaccttttctatataagattaaacctagaataaggttaacaaaaattgtagttagttatgctgcaactttagcatgatattttagttaatgcaaccatctttacatggttttttttatatagaattgtaacttaaaacgcaacgttttgcccgtgacaggtatggcatattcgtcaaactttatcatggaattgtaaccttggaacgttgggtcaagcttcaacacacatatgacatactcacggtttcacgcagacatagagtagctgtgttcttttgttggtgttggtaactaatcccttgcttttgttggtgttaggaactaatctctgatctctggtgcatgtaaaacggagttattaaacacatgactaattgcgtattagctatttttaaaaaatagattaatataagtttttaaagcaacattcgtgtgtgtatgtgtgtgtctatatatatatatatatatatatatatatatatatatattaaaaaaacacaccgttcggcggttgtttgagaagcgtctgcatgaaaaaggagaaatgtgaggtgggaaatgaggggaggaacacaaccttaggccatatttagttcctacacaagaatttttaaccctgtcacatcgaacgtttaaacacctgcatgaagtattaaatataggctaaaaaataactaattgcacagattgcgactactttgcaaaacgaatcttttaagcctaattgctcaatgatttgacaacacggtgctacagtaaacatgtgctaatgacagattaattaagcttaataaatttgtcccgcggtttactgacggatactgtaattagttttttttattagttcccgaacaccccatgcgacaccctatatacccgatgtgacacgccaaaactttacaccactggatctaaacacccccttagtctaaatctacctatcagccaaaaacatgggctacaaagttgttgatttgtgctagaaattgtgtgatttattgtagtgtgtagaaatttatagttgtaaaatatctcttgaatgccaataccatcatgatcgccgtatataccttgcggaatatcaaagaaaaaaaataaagctatgtgagccacccctgcagaaacaaaaaggaaactacctaagaaattaaagctccatcgtttgtttttcaacttatgccacaaccaaaattcgaataacacttagagttgattttttctgcattatagttatattttagaaatgattttactaagaacacatatataaaaaaattatatcattttagacttatgattaactttagactaaattatattagccttgaccctgataattcatggaatatctagggccccactgaattgatcgtgagctgattgcaagttaaaacaatctatcaacgatttaaaaaataatttatgagtaaattttttatacacgtgttctaaaaaacttaaaacaaatataaaaagaaaaattgcattgaaaatatcataaaattacctttaaatttaaattttaaattttaatgatcggtgattttgtgcagggaaaacgacgaggcgccgagaggcgagagcccattgtttgacacagccgtctcctctccatctctccgccccctgtatataaacccccccttcccctcctcgcccatcgcggcatcgctcgcctcctctgcttcgcttccttctccagcaagcacccgaccacaacacacacgcgagctcctcgacctcgagagagagagaaaacccaaccccgaattcggcggcggaggcggaggcagcggcgatggacccctcgtcggcgggcgccggcggcaactcgctggcgtcggcgtcgtgcggcgacgcgcagaagcggcgggtgtgctacttctacgatccggaggtgggcaactactactacgggcagggtcacccgatgaagccccaccgcgtgaggatgacccacgcgctgctcgcccactacggcctcctcgccccggccaagatgcaggtgctccgcccgctccccgcccgcgaccgcgacctctgccgcttccactccgacgactacgtcgccttcctccgcgccgtcaccccggagacccagttcgaccagatccgctccctccgccgcttcaacgtcggcgaggactgccccgtcttcgacggcctctacgcctactgccagacctacgcgggggcctccgtcggcgccgccgtcaagctcaaccacggcacccacgacatcgccatcaactggtccggcgggttgcaccacgccaagaagtccgaggcctccggcttctgctacgtcaacgacatcgtcctcgccatcctcgagctcctcaagctccatgaggtgacgtcatcctattccgctcgtacttgtgtttgttcgtttttttttttgggttcgtttaatgtttcgaatagattaggagtagtactatttggatgggtggtttgtttaatttttcgaatagatagattacttgatgtgtaagttgggtgggtcaatgaagacggaagcaaaaatcatcttgacttctttctcttcagttgctctgattttgtcgtgtacagttcgatcgatcttccgctaaattttgatcggtaggaaatattaatcatgtgtaagtgtaaatgaaatggctatctgtagacagaaattggattaactttttgctcaacttaatctcatatatattcgttacgcgattacacattgtctgaatagtatgtcatattggcacgtgcagaattatgtattaacaaatttattcagatttttgttttcctggataaaagctcatgtacgttgatgaatcatgctgaatgtatgtatgtatttctagttgatataatgatgttccaaagagagagaatgatatgacgacgaacttgctgcgtttgttattaaatttgcccatgatgtacactgttaaagctatgtactccctccgtccaaaaaaaaaaagtgaatctaggactggatgtgatatattatagtacaatgtctagattcgttgtactaggatgtgtcacatccagtactaggttggttttttatgggacgatggagtacgacgtacacaattagaatgttcattggacggttcatgataagagattgatttgattgaaacgtattcagaacaagaggtgattaatcagacagatctgaagaatgtatgttgcgtaaagacaatcctagattatcatgaacagttgaaagtttgaaaacagatcagatgttttttcccctatttggtctagttgtcttcttgtgctaaaccactaatatgctgtcttcatatttacagcgagttctgtatattgatattgatatccatcatggagatggagttgaggaggcattctacacaacaaacagggttatgacagtctcatttcacaagtttggggattatttcccgggaacaggggacatccgcgatattgggtattcagaagggaagtattactgcctgaatgtcccgctggatgatggaattgatgatgacagctaccagtccatcttcaagccgatcatcagcaaagtcatggagatgtatcgtcctggtgcagtcgtgcttcagtgcggcgctgattcgttgtccggtgataggttgggctgtttcaatctctcaggcaaaggtcatgctgaatgtgttaagttcatgaggtctttcaatgttccgttgcttcttcttggtggtggtggatataccataagaaatgttgcacgctgctggtgttacgaggtatctatactttcccccgtttttttttccttatgcctttaacaaacaattaattaattctattaattatggatgacaaagcaaagccatgagctcggtaatgtgttagaacctaatttgcttttgtgtttccactttgttccttgctcagcatcaagaacttgtcttctagtagttggtacctactgcctggctttgtttattgatccatgttgctgtaattttacaatcaccaaactaagattttggtttgtactgagcagatgactgaaatgcacagaacacctatctcccatttacatgtaatgcttaatgtatttattttctactctgtttcattcaaatgcattaatttgtgagaacttgtgcagtaacaaatcatccggtgtttctcaaagcattaaagtgtggttatttttaaacagataagtatcaggcaaggcactgctagctaactgttaacccttgcaaaatcatatgcttcaggccaccacctgttcctcagttgttagctttcatcagagatgtctttaataaattagcaacccaaaatctggtctctttggaccttgcaagcctggtttcgttgccttttgtgaatttataaatctgaacacacaacaggctaaacatggcgaacaagtgtgaatggctgcacttatgcttgcttgagtaaattatctcttatatcaggaacacctgttgctacagctatggttttatcctctgactgtttatttggttttttatttggccagacaggagttgcacttggtgaagagctacgggagaagttgccttataacgagtattatgaatattttggtccagaatacagtctttacgttgcagcaagtaacatggagaacagaaatacaaacaagcaattggaggaaataaaatgcaacattctggacaatctctcaaaacttcaacatgctcctagtgtccaatttgaagagcgaattcctgaaacaaagctacctgaggtgagtctccaggcttcctaatattataagcatgaaaaaaaaagatgtcttggaagtgataactcaagggctgactgaatgtattcgtgtcctgtacatatgtgctcattattcagccagatgaagatcaagatgatccagatgaaaggcacgaccctgactctgatatgctgttggatgatcacaaacctatgggacactcagcaaggtatctatttttcctttttctaaaagctgtattaaattttgtttaattctgtgccctgcctcatgttatattttcatttagaagccttattcacaacatcggagttaagagagaaattactgaaacagagaccaaagatcaggtaccttttcctcagttcattccaatgagcggtgctgtcctttctcattcataaatttcaacacacgacgtccaccattttattttgagatgtctcctttttagctaaatccttagaactaacagtatacttactccattcttttattaacatgtgcccttttgtttaaggggctattgcttatttgacccctttttgaatcctaactaccaatttgaccctactttttagagtttacttatttgaccctccttttcagaaacgaagctcccgtctgaccctgtttccattagtccgttaagttttaatttaaaacaaaaaaaaagaaatacaactaatattcataatacccagaataccgttagaaaaccctatgcatccaccaaaccctatccacatttctctccttgcggcgacggcggcgacttgcggcgagacggcgagccggtgccgccaccccctcagatcggcgccgccctggtgacgacgacgatgagccggcaccggccctagtgacgacgacgatgagctggcaccggccctagtgacgatgacgacgacgaggagtggcggcggcggctcatcgacgacgaagagccgaagccggcgccctgctgacgaggacgaggacgacgacgaagagccggagccggcgccgccaccccctcagatctggcgccaccgccgctgcgtcctccctccttccgcacgcttgcgccagcgccggccccctcccccgcctcctccctccttccgggcgcttgcgccgctgccgccgtcgccacctcctccctccttccgctcgcctgcgccgccgtcgttcctccctccctccacgagccaggacggccgctcgccccctccgtgcgcccccgccgcaactcaccccctccgtcagccgccgctgcctccctccgccccctctccctcagccccctcaaagcgccgccgccgccggcccatcagtcgccgccccgtggaggagaggagaagagaagagaagagagaagagaggagaggagaagaaggaactgcgggtgggtcccacatgtaatagagtcaaatgagtaaggacaaaagagacattttgtgcttcagttaacaccgttagatgcccttaacagaacagggtcatacgggagcttcgtttttgaaaaggagggtcaaataagcaaactttaaaaagtagggtcaaattggtagttagggctcaaaacggggtcaaataagcaattgtcccgtttaaagaaggtggcattccccttttgggtttatttatatacttgctccgtttcatattataagtcgtttgacttttttcctagtcaattttttttagtttgtccaaatttataaaaaaatatattagtattttcagcataaaacaaacatgttatcaaaatgtattcagtgtaagatttaataaaactagtatggtattttagattttgctatttttttctataaatttggtcaaacttagttaagtttgattaggaaaaaggttaaatgacttataatatgaaagtatggaacgtagggagtaacaatgaggttttctttatagaattctgttcttgctggcttgctgctatatgtgaattataatcttatccatatcggtgctagaaacatagtgaaattctcttgtgctgttgagttgtggaggaagactggtgtgctgatgaaaacatgtgctcatcatgtattgacattttcatctaaatgaaatttaaggccgcattggttgtacctttttttatctcacaggatttttttttgggttgtgcataatctcatccagattatttagaatctaccttgcatttatgcgaaacgagccctttgaaattcttgcagcacggacttgcatctttgtgtgatcttttgttgaactaacactttctgatttacacattctgcagcatggtaagagattaacaactgaacataaagtaccagaaccgatggcagacgatcttggttcctccaagcaagttcctgtaagtcgtcgtcttctctatccatctgcaaatccatagcacaaactctgcattgcataatgcctatatggatatagaattatccaacaccatggtttaatctgctctaacaaatcttttcatcttcacattgcttatcaacgatagactgcggatgcaaattcgatggccatcaacgcgccaggcaacgccaagaatgaaccgggaagctcactatgaactaacccacttcaggccaccagctcttatgccacggattcctgcatgctattagttacttactccgaggtgttgtatgactgtttcttctgtaggagtttacaaattacaactgtttcttttgttgaagaattccaaagtgtccaggcaatactggacgtggagacattagtctgatcaatgtactgcagagtacagaacatgtaacatgaaccaagttacagtgtatagtcttttagactgttagatggaactttcaggcgaaatgcctgtgcctacttgtgtgtgctctctgttggttgtttttcgttaaaatattttgttccggtttatcatgtacttcctacgtttttatgtatgagttgttttaaagagacaaataaatctattttttaatttataatagttaatacttaattaattatgtgctagtaaattttctcgttttgcgtgcgctgaaaatatcattttatactattgaatagaacggagctttagattgtgtcaatttgattgaatatagtcaactatttagaagcataatcagtggagacggaggtgcggttcagagattactgttaaaccaaccaattaatggggttcagagttagatctacacttgcaatgatgagaaagggaattgcttctatattattaatgtagactctgataatctagagagaatgaatgacttctatatgattaatgttgactcggataatctatctagaagatggggacttcagcagtataataagtgcaggttcagcgatggaaaaacaatatatatacaaaaaaaggttcagcgatggtgaagcaaaataaagatattccgatcgagtagaagaactagatggtaactaaaattacttttgatgtggtcatgagagcatatgtaagattttacttgtattatgcatgcaccagggaccaagattcatactgataaaggaaactatccctttagaaaatatattatataaattattttttgcggggaaatatattcatattattgataaacgaaactgttaggaaacgataaccgaacaaacgataaaaaacaatagatcaatcacagaagacacgagatttaacgtggaaaaccctctcaaaacaggagagaaaaaaaccacgggcgccaaccagcaaaatatcttcactatatctaaggtgaggttacatcgccgcacggcgacttacaagaggtatatatatagtggaaccttaaaagggatgacgatccatatcgctccgctacggcagaagctggcctttattaagtgcaaatgaatttggatcacaactcaacaaactccaccttgagacaaattccttcttgtagcatgaatcaatccttcaccctgaacacaacaaagacaaaaaacactttcggcgccaaatagcctctcgggctaaaccactataccaactaagcttgagcaaagctcaaacttagcaacaggaacatgctttgtcattatatcagcaggattatcatgagtacttatcttgcatacctttagcttaccttgcgcgactacatcacgaacataatggtacttgatatcaatgtgctttgtcctctcatgaaacatctgatctttggtgaggcatatagcactttgactatcacaaaacaagttaatgcaagaatcaactccacaaagctcagcaaacaatcctttcaaccaaactgattctttacatgcttcagcaatagccatgtattctgcttcagtggtagactaggcaacaacaggctgcaatgttgccttccaactcacagcacaactactaatggtaaacacataacctgtgagtgaccttctcttatccaaatctgcagcaaaatcagaatccacatatccaacaagccccttatcagtcctgccaaacttcaagcaagcatcagctgtacctctgagcctgaaaatccactgaacagctttccagtgttctttactaggattcgccatgtatctactaaccaaactcatagcatgagataaatctggacgggaacaaaccatggcataaatcaaagaaccaacagcactagaatatggaactctagacatgtattatacatcctcatcagtactagcacattgtaaagctgataatttaaaatgaggtgcaataggagtactaacaggctttgcatcatgcatgttaaaacgctgaagaaccttcttaatgtagctttgctgactaataaataacaaaccagaatttctgtctctagtgatttccatacctagaattttcttagcagcaccaagatccttcatatcaaactcactactcaactgtttcttcaatgtagtgatttgttccttgctcttggcagcaatcggcatatcatcaacatataacagcaagtatataggtgatccattaacaaatttaatatacacacagctatcaaattcagatctcttaaagccatgtaacaacataaatgaatcaaacctttcataccattgacgaggagactgtttcaaaccatacaaagatcttttcaacttgcaaacataatcttccttaccaggtactatgaacccttctggctggtccatgtatatctcctcctcaagctctccatgtaaaaatgctgtcttcacatctaactgctcaagctcaagatcatgcatagcaacaatactgaagaatgtgcgaattgaactatgctttacaactggagagaacacatcattataatcaacaccagcaatttgactgaaaccttttgctactaaccttgccttaaacctcggaggctcgctaggagataaaccctcctttctcttgaagatccatttacaacgaacatgcttcttctattttggcaagtgcacaagctcccatgtgccattcttctcaagagactgcatctcctcctgcatagctgagatccacttctcacagtctccagtaacaacagcttcagtgtatgtggctggctcaagagtattctccacctgttcagcacaactaaaagcataataaaccatatcacattcctcaataagacggactggagctccacaactcctctttgttctgcgatgggcaataggttcatcttgtggctgcaaaacaggaggtgagtgttgaacagtatcattaacatcattaccaacaatttcagtttcctgatcatccacgtgctccacctgcacgctaacatattgctactcctcatctgaaccacctggtatgacatctgtgggcaagctgtcattaaacataacagattcattgaaaacaacactcctgctcatgaaggtcttgttagtttcaggattccataacttatatccttttactcctgaaccataaccaagaaatagacacttaatagctctaggctctaattttccattatcaacatgagcataagcagtgcatccaaaaattctcaactgtgaataatcagcaggcttaccagaccatacctcaatgggcataccagaccatacctcaatgggagttttcttattaagtgggatagaaggcgacctgttgatcaagtagcaggcggtgttagcagcctctgcccaaaaacgcttgttcatgcgagccttggagatgatggttctgttcatgcgctcagctacaccattctgctgtggagtgtacgggatggtgtgatgcctaacgatgccttccttcctgcagtaatcatcaaaagcatccgaacaaaattcaccaccattgtcagtgcgaagtacttttacctccttttcagtttgcctttctatcataactttccactccttaaaagcagcaaatgtatcatctttatgtttcaggaaataaggccacacttttctagagtaatcatcaataatggtaagcatataatgagcaccaccaagagagggcttacgagaaggcccccacaaatcagcatgtacataatcaagtatacctttggtgcgatgaactgaggtattgaattttaccctcttgtgcttaccaaaaacacagtactcacagaacttcatgttaccctgagtgcagccatccagcaggttcctcttcatcaattctgccataccaagttcactcatatgtccaagacgcatatgccacaggttagtcttactaggttcatctttagaaacaacagcagcggtaacagaaccatgtaatgtacttcctctaaggacatataagtttgcagaattcatatcaccaatcatgtaaacaagagaacctttcgatacctttacaactccacctgaaccggagtatttgtatccttctgcatcaagtgtgctgagagagatgagatttctcgccatccctggtatgtgtctcacatctttcagcgtacgtgtcatgccatcatgagtcttgatctgaacggagccaatgcccacgatctcacgtgggttatcatctcccatgcgcacaacatctccattctgcacagacttgtaagaactaaaccaatctctgttaatgcagatatgaaacgaacatgcagtatcaagtatccattcatcatgactagcaacacaaccagcaaaaacaacaagacaatctcctgaatcagagttttcagcactagtaacaacagaggccttaccatcagatttccttttctccttattctgcagcttccaacattcttcaatgaagtgatttttctttttgcaatacttacagaactttttacctctggatttagaacggcctctactctgactcttgtcacgatcattgctgacgttgtaggttttctgctcagatctgcctctgacctgcaatgcttcgcccttagaggacgacgcatcagactaaaccatacctttcatcttctccctgttttggagcgcctcataaacttccgctagggttagttcatcacggcttaaaagtatggtgtcacgaaaatttgcatatgaactaggcagtgagcataacagtaaaagacctaaatcttcatcatcaaactgtacctccatcgacactaggtcggcaacgatctccttgaagaccacagaaccactctcctgcaacttgtgcgagaacaacttcatcttgatatgcatcttactggttagatctttagacatgtagatcgattccagtttgagccaaagttctgcaacagtcttttcctgcaacacttcttacaaaatatcattagatatatgaagttggatcagcgacagagccttacgatctttccgcttctcctcagcggtccattcagtcgatttcttcttcccgaagctttccagcgcctcatcaagatccgaagtttgcgccagaacagcctgcatcttgacttgccacagcgagaatctcgtcttgtagtctagcagcggtagatcatacttcatcgacgccatcgcgaaaccctaatgtgggaacaagctctaataccacttgttaggaaacgataagcgaacaaacgataaagaacaatagatcaatcacagaagacacgagatttaacgtggaaaaccctcccaaaacaggagagaaaaaaaccacgggcgccagccagcaaaatatcttcactatatctgaggtgaggttacatcgccgcatggcggcttacaagaggtatatatatggtggaaccctaaaagggatgacgatccatatcgttccgctacggcagaagctggcctttattaagtgcaaatgaatttggatcacaactcaacagaaactatcccttttaaaaaataaggttcatacagagaaacgaaactatcccttttgaaaaaaggaatgctagtaggtgaaatgaagaaggttgtacggtcttgtgaattagattatcagtctcttcctcggtacagcacggcccaacaatcagaagaagggagcgaaaataggcttattccagccattagacacggtccaaagagatgagataggtaaaataggcttatttcagctatataagacacaactcaagagaagcaaaatagactttgtcagtgatatgggcccgggggtatcatgtttagagggaggaggctgccccccaatgccacgtggccctcccccgaggggagtcaggcccgaggtggggtggcggccactcctacatagactagtcggaggaggctgccccccaatgccacgtggccctcccccaaggggagtcaggcccgaggtggggtggtggccactcctacatagactagtcggaggaggctgccctccaatgccatgtggctctcccccgagggggatcgggcccgaggtagggcggcggccactccttggccgagactagagggagaaggctgccccaggcaccacgtgatccttccccgaggggggatcgggcccgaggtcgggcggcgaccgccccctcccgtgactaggggtcgggctcccccgaccccctctttaggtcaccacgtacggtgggttaggtgtccgcctccaggtgcccacctacccgcattaatggtgacccgagcggtcgcgccacgcacgcatttaatgcggtgtgcagtgcactcaacaggtctgtgaccggtcgaatgactgatgggatccagaatgtcaggcgcaccatcgcgtgtgtcaggcgacgtgcagcccgacatatcccatcaaataataatggtgagaggttctcatcctcttattccagtcggagtcggtcctcctgctctggtcaaagcaaggctcccgtttcctggtgtaataggagcccagaagtcttcacccattaaatggtgactgacaggggcaccccccgtgtcaggcggcaagatttgacaggccccatcatcaagacgacgtgcgcttggcttcccaagtcaagagacaagacatgcatttaatgcaaagattataatacttctccaccggagctaggttgggttgttgggcctatgtggtatccccttgagctataaaagaaggaccctgcccactgagatagggggacgactcccagaaaacccgaactcgagaagagaaggagcaggtgcgctctctggggaagaaacccttataaaactcatccataatcccaaacacaggagtagggtgttacgctcgatagcggcccgaacctgtataaaccccttttgtctcatcgtctttgggggattgaaccccctcaagatcacacagcttcgctcaccgaatcctcgaatctcacccgctgctcctggccgaactcacaaaggggggcctcacgattccctggtggagaagttcattctccgacagacttatttaaggacgagcacgtgaaccgattatgcattcagaccagcacggcatgacctgagccttattggactgtaggtgtagcttgtggaccggcacgacatgacaagtcggaccgactactctcgggtggttccggcccgactactcttgggtcataccttggtcatggtgggcggcctatttaatttggccatctataggatgcccatttccaacacaaggccgcgcgcaccaccacctgtgtcatctcctgcgtcatcgccgccaccacctaggagcccatcctcgcgtcaatcgctcatttccggtcgcgacctcgatcaatctccgatgcgtgatgaactgatgatgaacgatgatgggaggcagctaggatgtcaacgtgcttgcctcactcctgatcgagcggctcatcatgctcttctcatgtggcttctccatgctaataaagattgagctcgatatagatagccataaggtctgaggtccgacggcccggcccaaggcacgatcatttggcccggcccaagcacggcaccgtccgattggtgtcgggcccgtaccggtatgacccaacagttgggccatgcctgggccgatgccttggcacggtgggctggcccggcatggaacgatcgaagaaaaatagtagaggatccaaaatagacttaatcagccatataaaacaacatccaaagagaagaggaatacaaaatagacttattttctagccatatggacacagcccaaatagttgagggagaaaaaatatacttattctgtggagagtacgataggctgtctgacctttgggtcggctcggcacggccccaacttattgggccgtgcgtatagcccgtgggctggcacggtatggcactacgtgtagatcgggccgtgccggcccaactgccctcggcctaggcccggcgatgccggcggcccatttggccatctgtagagctcgagggcattggatcaaggggaagagagaagataacttagagagagaggggaagtgaaaagtaaatgaaggaagaatacaatgataattttgttaaaaatttctaaaatgaattgcagtcatatctttaatatttattaaattgtaatggtacggtttgaatttcacgagttgtaatactttgttttcaaaacggataaatttatattggtatgaatctagttaactcgactagatatgggtatttcaactttcggagttaagtagttttttcaacatttaacaagtacatttctacaacttgttttcaacatttgacagcaacaaaaatataagatattttgtgttatctcctgccgctgctgtttcgaacttcggcaagttgcagtacaaagtcaaccttggcgcgcagcgcgctggtggtttgtgaccaaaccgtgatttgttcctttttactacattcccatagtccttaattttttaataaaataaataatcaaataaacgttcaaaaatgaataataccgtatatttaaaaataaaatgagtattacattctagcgtctctcgtcggtttcagtggtgctagagtctattcttcaagaagaccatctctagtcatttgctggcggcctggcgctgctgcttttaggggtttgctgggagtttagtggggttccgcctcctccaccctccctcgatataggagttttttttctctcttttaagtagtggagtagttccttaactttcgttggtctttttttttcagttttttcttttttttcctatgctccattaatagccttttattcatttatgttgtataactattcttttaatcacgtgtaatatttttgcatgttcaataaaagaaattacatagtagcgtcattgatcagctaaaactgctacgtagtcgattttggctttggaccagtggaaaaaaaactaaaagctaataattgagttactaatgtcactgtctgataaaattaactctgcatgctgaaggtcttgtgagcttctgttctctactttattcaattacagggtctcctgaaataaaaataaaaagataaagaagatcgaggtggggacatctctaatcagggagcatgaaacctaaaagtcttggccttatcttttcggtatatttatacttatcagtcaaatttaaatttttaatcttaaatttaaagttgattttaaggtttttccatcgaaatttattttttagcttttacttttagatcgctacgaacacgtatatcaaaaattttgttcacaaattacttttggttataaatatgctgcatgaataagccaaacaatgggaccgactgaagctgacccgttgaatttttttttatgtggtcagcaacgagccaacgactcaacattggtagtaaatcagctcatcatcgctggtgagtcaattattaagaaactggcattgcagcggagataaccggaaacaacaatacggaatgtggacaaattcagcggcgtatttccacaagaagggaccactggaattgaattggaagcaacggtctgtgctgaattcttcgatatgatcaactctcgcgtcagtgtaccaatttcggcaagtaggggccgactcaggattagcccaaagcacagacctcacctatggtaggccttgcacggtaattactcacttaataaggcgtacatgaatattcaactatttaaacatctgacaactaattattttattataggttaaatttatttgataaaaaataatatcattggagtgacatttgaatttactttcatatgataaaatttttttagcgtaaacgttgtaatatatgagaaatttaaagagaaacataatttttgaataccatgccaagttcaacagctccttattcagtgggacggagggagtacgtcgtaggctaagttcagcattcaactttcccaacttatatataataccttgttttccttgcacatgttttccatactgttaaataatatatatttttttaaaaaaagtttctataggaaagttattttaaaaaaacatattaatctatttttaaatttattttaattaatatttaattaatcatgtgctaatgaattatctcgtttcacgtgtggggaggtggacttcccaacctccacctccaaacatagccctaataggtctccaataaatccaaggcctcgggccacgtcctgggtggcccgaggcttgggtctacccctgtcggcaaatgtatattgctcactatggcatgtcccctcatgtggcaagcgaccactgctgccacaaccgacgatgacaacctcgagctgatggcgttcgtgacacgtgcgttaatgttaatggctcaccgccaccgccggtggctttggagtagacgtggggaaccgatttgttcccgtgtgctagtggcgccacgtgatgtatgggcccctggttctctgccggctgtcatgtcgcctctgcttgccttaaagcacggataatagtggactataagttagttataagcttatgtggaggagagataaaaaaataaggagtattggctcttatgtaagaactaactctagacatgtcctaaaataaatgcattaaggctgtgttcccaacctccctctctcgcttaccactcgcacgcttttcaaactgttaaactgtgcatgttttgtaaaaattttctatacaaaagttgctttaaaaaaattatattaatctatttttaaagtttttttaagctaataattaattaatcacgtattaatctattgcttcgtttttcgtgtaggaggcacctagctaagaacacagcctaaatacataagtgaaaaaaagatagagggaaaaaaataaacacaaccttatagccactcaattgtacttgttagttctaatataagcttatagtcagtagttcgtgacttcgttctactatttaaacttgatcatatatcctgtagttatggttagacctctcgatacgttaattcagtaaaaaaaaatcgaatcaactgagactgaattactctatcttaaccaagactaaattcggatttgctagttatcaggtgactgagattttctccaaatctaacttaccttcttcttgggagccacaacctccagcaaggactactatggaaagaaagaaaaggacgagaggtgtaacctgactaacttcagagggatggtggctttgagtggcagctggacagatgatggtggttcgcggcagggcgaaaccaacaggtggttaagaatttaggggacggatccgacggcgagcggagacgaggaagcattccctgtgaactttgattcgaagtcgtgatttgacccttaccggacttgttgtcattgacaaaggaagaatggaagcaaagacaatgttaccgcctcgctggaaaggcgcccttgaccgtgaaatgcctccgcgcaagccttgttttcaaagaaagatctcgtgattgtacacacgaaattttcatggcgcaatacatctgtgattcttgagaactatccctgttcgtgaatcctttatagtatttatatttgtcaccgttaactattacggttgcaactttaaccactaatattttgttttcaataattagattatgatgaacaaaaatatagtttaatacttttgtttaagtaaataatacactttgatagcatggctattaaagtatttagaatctttttttaaaaagaaaaattatcaaagtttaaatacgaatagtgcttggtgacagatacaaaggaatagatggaatagtatttaacttgttcaacaagatgttgaagtgtttgatgaaatttcgtaccaaaaattcatagaaaaatcattggggattaattttacgtgccaataacatttgcaacccttatttacaaaatacatttgagggacggctttatgataggcgagcccaaaaattccaaatgtcgcgatggtccgaatatattcaatattggacttgtcattttatatttcaaataaaaaataatggttcaaacggatttgaaatacaatacatgattccaaatttctaggctgttctagcggtagtccttgttgatggctgctaattagtactctgattggattgattatctctagcaactgtgggcacacgaccaatacatgcatcttgacaatttaaattaacgcgtgattagcggcggggtttgctgacacggttgagagcatgttgaatagcatactataaaccagctatacacattttttaagcagataaaagatgagagataaaaatagcggactacagatttgtagccagctatagcacggactccaagacacattttatatatgatagatgagatcatatattaattgtgtagtatatatttatagataattattatatgaattagctattaagttaactataaacgatttggaccaaaagttagctatactattaaacttgctctgagagtcatgtggcatgtgctggtcacggtgaatattatgtcgcgcgtacagacaaatattgggaggaatcgggagaaggctttatagctagtgatggcgcatagcggcactgtgcagaactgcagatgcgcagccctgcactgcacacatgtacatccagatcaatatagttgccaaagtaatcgtcaaaaggagtatgcttcatcgtcgctggtgcaacaccgaactaatcattcgtcttccgtcgagtcgcgcttcatcaacatgatttctccgtcaacctatttatcatcaacaacacaacagcatcacggtgctgtgcgcatatttgcatatatagcccggtattatcagagggatcaaatatacgctatagtgctgtgaggtcgcgaaacctgaccgacagaaaagtaaagtagagcacatatgaatatatcatggatacgttgtgaacttgttgtcatggatacgttgtgaacttgttgtcatggatttaagtatcccagcgacagtaaacacatgcacacgtcatctttattaatcgattaacatgagctaaaaataaatacaaggctagtatgaccctcacgagcgttggaccgtctaacttatcaaatatcagagctggatatttatttgtataaatttgggaggagtttgagccttattgacaatagaccaaccatgatttatgcatatttatattcttgttcgtgatacaatatcgatgtgaatatctatttgtataaacttgggaggagtttaaggtggtgtttggattcaaggactaaattttaggacctgtcatattggatgtttgacactaattagaagttttaaacgtaaactaatgaaaaaacccattccataaccctggactaattcgcgagacaaatctattgtgcataattaatccatgattagcccatataatgctacagcaagcatgttctaattatggattaatcaggcttaaaaaatttgtcacgtaaattagctctcatttaatacttctaattaatgtccaaacatccaatatgatagggactaaaatttagtacctgaatccaaacaccacctaagccttattggcgtcagattgttgacagaaaacacgtggcctgggagatctgcttaactccagtgcaggtccaaaactcgccttcggatgtattagcgtgacagttgatttgatcctgtaatcaacaagaaatagaaacaaagaaaccgtagttaaatctataaatgatagccgatcggctagatgccgatgacatatcatttatctttgggccgatgtcatccatgtatcgatcggcagtcataaataagtaaagaagaactaaatctactcgatcggctatagatattaacgatatatactccttatatcgatgtatacttaaatcaagtgattgggatagattggtcatcatgccgagacagtataaatcacttagatcgaaatatatgtcaataataagactatatatgtttatagcatagacgatcagatagatctagcatgtatcggctaatactccgatactactctatatcaagatattaaagcaagtataatatattgagcaaaagcctaacatacttagatacaacaatatcttaacataaagggcagatttaacatgtcaataaggcatatagaacaaatgaagttaaatcagatacgatcggctgaaactccgatgctattctaatcggcaactagaaggcaggctagagatcgatattctaagcacgacttaatagatcaaactcaactgatgcagcattaagtatgaaaagaagaacaatttctagacaatcaagccgctagaagtttcatagaatggtagatatctcatataatctagatcaatatcaaaatctaacctaatcggctgccctctgcatacagatgttagccgatagtagattaggtggcgatattgctagagattatgtaaggtatatgataactcgatgaattatataaataagatgagagtatcataaagatggaagcactaatcctaagaacacaatccgtcataacgaattttacctcttgttgatgatcgaaatcgatgcagctcaacccgaaagcaagaactcgtcgaaactaaagcaaaaagggtggcgatgcgccgagattgtattgaacgtgtgtgttaaaaattacatagggctcggggtctatttatacccgaggattacaagatatgcctataccggacatgaccactatctctaacaaactctaagataccacaagtctttgcggcagacttttgcccacacttatctataagaaatttacataaaatatcctaattaatagatacaattgccttcccaggactccatccatacgtgacaatcatcttgaagtacattaacttgaacccgatgtcgcgtacaagtcatattgtcggaatcggctatatcggcttatttagctcgactcagactcagccgatcccaaccgtagccgatccgggcatcagccgattcctgctttgtttccgaactcgatcttctcttccgactttgcttcgatctaatcttctctccgaggctgatgttaccaaatttggttgttaacacagaccaacaaggctcaaactgaatttattaaaaaaatgcagtttgttgagaatgatgaccgaaattaacttaaagaaatagggactgtctagtattgtcaactaaaaaaatcatttaattttttgaactgattgtacaagattcatgcggaaacacgcaacaaccttaacctcaccctttttttcccttttccttttcccgtgttcacttaggctccgttcataagtcctagttcctaacttcctccgcctcattttccgcgcgtacgtttcccaaactgctaatggtaccttttttttaaaaaaaaatttatacgaaagttgtataaaaaatcatattaattatttttgaaaaaaaaaactaatacgtaattaatcacattctaatgcattgctccgttttcccattccagcgaacacagccggagctagtcctgcgcatccgcatcttggaagaagaaacgagcaaaatacaacacgcaaaagagtgtttccctatgctgacggctcacgtcttctttttcttttttcgaacgactcacattggatggtgcgaagttctattgataaaacaggaaaaaattaaaagattacaatctgtaaggtcgtaaccaggaaaaacaaggcttaaagtcttcaagataagtttttaaaacgagtccaagccgccgggcagactgcgaatttgcaaacccgtcgaatgccagccagtgcacccacaacttgttacttggcttgaatcaaactacacagtggcaagtgctccttccagctatatattaatcacatcataaccttcaatttgccttaagagatatagcagaaaagaaaggaccaaccaacagcggcagcaatggtgttgatccaccatacccatgaccatgagcttctcttgctcgccatcatcatcttcctttcgtgctctaacaatggccatgcctcccggcctcaccttcttcatccaccaccaccaacgtcaccgaccgccttgcgctcatgtcattcaggtcgctcataaggagtgacccaacccaggcactcgcatcctggggcaaccaatccatcccgatgtgccaatggcgtggtgtggcgtgtgggctgagtggacgccgcacaggccgtgtggtggcgctggacctcaccaagctcaaccttgtaggcgccatctcacctttgctcggcaacctcacatacctgaggcggctccatctccacaagaatcgcctccatggcgagataccgtcggagctcggccatctccgagacctgagacacctcaaccgcagctacaactccatccaagggccgatcccagcgacgctttcaacctgcagaggaatggagaacatttggctctacagcaacaagctgcagggccaaataccaagtgagtttggatccctgcaaaatcttcaggcacttgttcttggggaaaatagacttactggaagcatcccttcattcattggaagcctcgcgaatctgaaatttctaatcctagaagaaaacaactttacaggagaaattccatcagacataggcagactggccaatctcactgttctaggactaggttctaatcaactctcaggaccaattcctgcctcaataggaaatctctcggcactacaatttcttagtgtcttctctaataacctggtaggaagcatcccaccgatgcaacgcttgtcctctctcgaattctttgaactagggaagaacaatatcgaaggaagcatcccaacttggctgggaaacctctcatcattacttactgtgaaacttggaggcaatagactagatgggaacatccctgaatcactggggaaactgaagttgcttacatctcttgatctatcaagtaataatctagtgggcccagtacctgatactattggaaacctatattccattaagcagtttcatgtagaaaataatgagctagaaggttctttaccttcttcaatattcaatctttcctctcttgaagaactcaacttacaaaccaacaacctaaatgggaccattccacttgacttaggcaaccgcctgccaaagctccagttattcctaatatctgaaaaccagtttcatggctcaattccaccctccctgtgcaatatttctacgcttagatggatccaaacagtaaacaattctttgtcaggaaccatcccccaatgcataggaatcaaccaaaagagcttatattccgtaacttttgcagtgaatcagtttgaaacgagtaataaatatggttggagcttcatgtctagtttaactaactgcagcaatttgcgactacttgatgtgggtgacaacaagcttacaggtgagctaccaaattcaattggcaatctttccacacgtcttgagtattttgtcaccaactacaacagtatgactggcaaaatacctgaagggctagggaatctggtcagcttgaagttcatcgagatgaacaataacttctacgagggcacaataccagactctcttggcaaactcaagaacctgaatagactatatctcactaacaacaacctttcaggatccattccatcaagtatcggcaaccttcgtatgctaacattattatctgttgcaggcaatgcacttagtggagaaataccccccagtctcagcaattgccctttggaacagttgaaactctcatacaataatcttactgggttgattccaaaagaacttttcgccatctctgtcttgtctacttctttgattttggatcataattttataactgggcctctgccctctgaagtgggtaatctaacaaaccttgcattacttgatttctctagcaatttgatttctggagagatcccgtcctccattggtgagtgccagagtctacaatatctcaatacatctggaaacttactccaagggcaaattccaccatcactagatcaaccaaagggcctcctgttgcttgatctttctcataataatttatccggaagcatccctaagttccttgggaccatgacagggcttgctagtttgaatctttcattcaacaactttgagggtgatgtcccaaaagatggaatctttagcaatgcgactcctgctttaattgagggaaataatggcctatgtaatggaatccctcaactgaagttgccaccctgctctcatcagacaacaaaacacaagaagcaaacatggaaaattgccatggcaatttctatatgcagcacagttctatttatggcagtagtagccacatctttcgtgttccacaaacgggccaagaagacaaatgcaaaccgacaaacatcacttattaaagagcagcatatgagagtttcttacactgaattggctgaagcaacaaaaggttttacttctgagaacctcattggagcagggagcttcggctctgtgtacaagggaagaatgaaaatcaatgaccaacaagtagctgttgctgtgaaagtgttcaacctcaagcagcgtggttcatctaagagttttgcagcagaatgtgagactttaagatgtgttcgacatcggaaccttgtaaaggtactgaccgtatgctcaagtatcgattttcagggccgtgatttcaaggccattgtatacaagttcctaccgaatagaaatttagatcaatggctacaccaaaatatcatggaagatggtgaacacaaggcattagatctcatcacgcgactagaaatcgcaattgatgtggcatcctcacttgaatatcttcaccaatataaggcatcgccaatcattcactgtgatcttaagccaagcaatgttctcctcgacgatgagatggttgcacatgttggtgattttggccttgcaagatttcttcaccaggacccagagcaatcaagtggttgggcatcaatgagaggcacaactggttatgctgctccaggtaagctcctaattgttgtagcttttttttatcatatttcatattatatgtatcctactatgctggattcagccaaaatggagtaagacttattggtacttcattttactacatagacaagttttgatgaaactcttatttccctaggaatttgaaaggggaaaaatgaacaagtatatggtagcaaaatgttgtatcctgtaaatggatttcgcacaaacataaataggcttgtggagttattttctcataagccatttcttatttttagagtatggactgggcaacgaagtctcaatccatggcgatgtatatagctatggtatattgttgctggagatgtttagcgggaagagaccaacagacagcgaatttggagaatcccttggcctccataattatgtcaatatggcattgccagacaggacggctagtgtcatagaccttagcttactagaagagacagtggatggcgaagcaaagacatcaaaatctaaccagacaagagaaatgagaattgcttgcattacctcaattctgcatgttggagtttcctgttcagtggagacaccaacagatcgcatgccaatcggagatgccctgaaagagctgcagagaataagagacaagttccacagggagttgcaaggagcaggagcgacaaaccatcaagacattcaaatctgttgatgcgcagcaaccaaccggatcaataaaggcgtaaagagctgcaagatttctgctactccttgccatctaggctagccaaaataaaatcataatgttgcaaattacaaagtttggcattctgtttgatccttgccatgaagatcttgtacatactatgaaccaaccacatcttggcaaatcacattattatatgcttttcctttgttgatatttcttcctcacaaaaccatatatgcctttctattccccttttgtaagtgacacagtaaacctagtcgcagtgaatctctaaaaaaaaaaaaacactatacgcttgcatcttagtttaactacccgcaggattccatccatccaggtgagttccccttcctttgtttccattaggtaatcacagaatcacagtagatcactacatatatatgaacgaaagtggggaagagggcgttccttcacctccggggtagcgaacgcgtcacgctagaaggagaagaggcgtgtcgcgggcgcgggccgggagctccgctgccggcgccggggttgcggcttcacggcgagcttcgcctggatgcggggccagtggcgctcgccgccgacggcgtcggatctccggtgggccgtggggcgccgcgtggcggagagagaaatgggagtgagggagagaacccaccgaagcaaaaggggagagtagatttgggctttgggctttgcttaatgggctattccccctaaggccgacacgcatgtggatccatgaattttggagggtttttggaaaaagtacaccgaaggtccctcaacttgtcatcgaattacaaaatcgtactccaaccacaaaaccagatacaatacaggagatccttaacccttaacttacaaaaccatttacttcagttccttcggtggttttaacttaggtggcggctgagtcagcgtgggacccacgtgggccccacatgtcagtgtgtacagtcagcacctctctccttccactgttttctcaccctcctctctctcactcgggcagggcagcggcaggtggggaggaggccggcgggtcggcggggcgaggcaggagaggaggtgcggcagctggcggcggcagcgggagcatggggaggcccagctgcccgtctgccccgacgccgccgcggcgcgccgtcgtggttgcgggagaggctgtcgacgatgaggaagagctgggcagcgacggtggggaggtgggcgtgggcggttgccggcggaggaagagatgggcggcggcgacagtgggcgaggagctgggccgtagaggcgatgtgtccggcctgtactttgatcgtctcaggggcagtactatcacaatttcaagttcacctgtctcttttgttcttgagagaagttcagttgtttccaacgaaagtcaacgctttgctcctctctcaaggcctcgatacaggattttttgtttgaaaaggaggattttcggtattgattccaagtcaatggtactagttttgctcaagtaaacaaaagcacaaaacacacatacatgtcgagttctaacatgttgctagtggatgaaaaacgcctcagcttttacagttagtgtcatgaagatctgctagatttttttcttatgtcctgatgcacttgtttcctgtcaaatttctatgaaaatcacgcagaattcatacgattttagacagccccaacattacacacacaaacacaaatgcatataccatgctcaatgtcctgcttgaatctcttgtattcctacaaaacaatacacatccaatttctctttacaatttacaaatcactttactgatcattctgaaagatgatcagttgagaaatttgaggtagtccttgaggtccgtggggaagcaagggtactactgcctccagaacgcgccgtgcgctcgcagcatcttcaccgccttgtccttggtcgacggcgagctctccacctgcatcagcgccagcagcttcgccacggcgccgcccaccaccatgtcctccagcaccctctcggcgggggtgggggcgcacgccaccagccacagcacgttgacggccagcctcgtggcgagcccggacacccggagcacggcgcgcgccacggcggccaccgccagcccgtgctaggcgaaggccagccgcccctcggggcacttacacaggcgcttcaggaggaggagcgaccgctcggcgacgtggcggttggcgtcgaggaggagcacgtcgtcttgccgtacctgaagaaccaccgctccatgctgcggcggtcgtaggtgacgccggtggccaccgtgacggggtcctccattagctccatcgagatggggcactggaacaggggaggaggctccatggccgtcgtcctggtcgcccggcggccgccgccctcctcctcccaccaccgcgctcgcctccggccccgtgccgttcctcgtcgtcgacagcctctcccgcaaccacgacggcgcgccgcggcggcatcggggcagacggggcagctgggcctccccatgatcccgccgccgccgccgccgccggctgccgcacctcctctcctgcctcgccccgccggcccgccggcctcctccccacctgccgccgccctgcctcgagtgagagagaggagggcaggaggcgagaaaacaggggaaggagagaggtgatggcgtggacagtccgacaggtgggccccacgtgggtcccacgctgactcagccgccacatcagagaaaactgggttcaaaaccattaaaggacataaaataaacggttttgtaagttgagggatgtcgtatatctggttttacggttggaggacgattttgtatttcgatgacaagttgagggacctttggtgtactttttccgagggtttttcatgattggttttagtggattttatcattctttgggctccttgcaatgaaagaaaaatcaaggaattttaaaagatttgaatcatacaatgaaattttctatgagactcttttgggataaaatattgggtctctaaaatttatactccttataaaagggagtaatggcccaccaccaactttcaactttctttaagagaaaaagggacatagtctcacttgttaactactcataccaactctctattttttctgggaatgaaaaatgaaagttttacagagctcgccaacctttatcgccgctactgcctcccacgacaggctcactaggtatgccgcccacctcgagcccactcgtcacttttatcgccgctactgcctcccacgacaggctcactaggtatgccgcccacctcgagcccactcgtcactgacctcccactgccattgctgtctctcacagatgggcctgccgatcgtcaaccttctccctgctggcaagttgttggggaagagaagagaggtgaaagtttacttacatgtggcatccataattttttttctgattagaatgccatgtcagttaaaacaaacatccatactgttttagaagtaacttgaacagtttttgttaagaggaggggtgaaaaattccggttatatggttagggatatcacataaactcgtcgtaaagataaaggacagaaagtggacttattccacctctgtgcactgaccgttgaaggtttgaagaagcccaagagagcccaaagcaaggcccgtttcttcttctgcggcgcccggcgctcggcgctcggatcaatcccgccgacgagcgcctccggccgccgcctcccttcccccgccgcgggaagctcatggcccttccagcgcagccgctcccgtgtcctgaacgaccaaccgccgccgccgcccggccatcgcgtcatcttcatccaccctcgaggcgacctccccggaggtaaaccgctcccccccccccctcctaatgcctgcacgattactaccgattccttctacataactagcaaagtgatccgtaggaacatttcttgcaaaatggttgtagattcagttctaggtcgtcaactcgtccgccttggagaagggaatagatctcatagatcgaatggggtttctactttcttctgaacaattttttttttcgaacaaatgccctagtattcaattttttttagccgcacagcacttacaaatttgcaatcatgtataatatagagcctctctgtaattgatgctagctttacataaacaaaaagctgcagaatccgcagcttccggcaccttatttgtgtgttcaatgacatggagcataatatcatgccatgcgcaaaaatgatcttggaatgcttcattgtcttcattggcttgatgttccttcattggacacatgtttctcaaacttgtctcttattgcttgcaactccttcagagcgtctccgatttgcacgcggtccgttggtgcctcctctgagcaggagattccaatgcgcataaccgaagtgacacaagtaattcttagatccttgccgttgtaagagtttgacttgattgctccgccatcttctgtctctggtagtaactgttgatccagaacattagccgcattgtctggcaatgccatttggacatacttgcgaagcccaaccgcttccccgaattcatcgtctgtgggtctttttctggtgaacatctctagcaacagtatgccatagctatagacatcaccttgaattgagacttcattgccaattccatactctgaaaccaacaaaaggaactgtgaagaagaagaaaaaaatgggtacatttccccattctacataaaagggacttctgtcgaaatatactcatataattaagtgagtcagataacaagaaatcctactttagaaagcagatttcttgagttatatacacagaagagaatacagaattatagcaattagagacttagaggtgcacctggtgcagcataaccgactgttcctctcattgatgcccaaccacttgatttctccgactcctgatgcagaaaccttgcaagcccgaaatcgctaacatgagcaaccatgtcactgtcgaggagaacattgcttggcttaagatcacagtgaatgattggcgatggcttatattggtgaagatattcaagtgaagatgccacatcgattgcaatgcgtagtcttgcagtgagatctaatgccttgtgttcactttgtcccatgatattagggtgtagccattggtctaaatttccatttggtaggtactcatatacaatggccttgaactcattgccctgaaaatcaatactcgagcatacagtcaatatcttcacaaggttccggtgtcgaacacatctcagtgtctcacattctgccatgaaactttgagatgcaccacgttgtgtgaggttgagcaccttcacagcaactacttgttggtcattgtttgtcattcttcccttatagaccgagccaaagcttcctgctcctatgaggttatcagaggcaaaaccatttgttgcattgactaattcagcataagaaaccctcgtatattgctcactaatgagtgatatttgtgggtttggttttgccttcttgttcctatagtagaatgcaaacagcataaatattaatgtgattaatggcattattctgcatatggagattatgatgataagtttcctggatgccttcttggtggtttggttgaagcagggtggcaatttcatctctgggataccgccacacaggtcatcatttccagcgaggaaggtagctgttgcatttagaaaaacgccatctctgggaacttcaccttcaaatttgttgtatgagaggttcaaaatagatagacctctcatgcccccaagaaatgcagggatgcctccagataaattattgtcagaaaggtcaagcaccaggaggccctttagttgcccaagcgacgatggaattatcccttggagggaatttccagatatattgagctgctgcaagctcttacattcaccaatagatgtaggaatctctccagaaatgttgtttgaagaaaaatcaaactctccaagattttttagattacccatttcagctggtaaagcccccgataaaaaattatgtcccaaaaacatgttactggacaaagtagaaatgagaaaaagttgtttaggtatcaagccagtgaggctgttatatgaaagatccaatagttctagaggacaactgctaagattggaaggaatggacccattgagtgcatttccttggagttgtagtagatttagtcctgtaagattgccaagagttggtggaatggatccagacaggttattatatggtatagataatttattcagcatcttgagtttgccaagagaagctggaataattccctctaaacggttaatatccatatagagcaattttaagttgatcaagttccctattccttcaggtatttttccttctatattgttgttcgctatgataagatagctcaaatgcgaagaaagattcccaattgaactcggtagctcaccttgaagcttgttgtaacccaaatctaatgcattcaaattgctgcaattcgccaagctggataagaaaacccaatcagcatcatttgttgcttcaagctgattttttgaaagggccacaactgataagctcttctgttgaattccaagacactgaggaattcttcctgacaaaaagttgtatactgtttgcagaacttgaagcatggtggcattacacaaggatggtgggattgttccatgaaattgattgatgtctacaacaaacctttgtagattcggaagcttattgccaatatcaggtggaagagccccgctgaggcgattgctttgtaaaccaagatcatcaagggaggaaaggttgagcagtgaaggaggaaacgaaccttctagtttattataatccagacgaaggctactcaaggcaccaaggtttccaagagaatctggtatggagcctgaaataagattattttgtgaaagatcaaggctagtaagcatctgaagtctacctaatgattcagggatgtgtcctgagagccgattttgctggagactaacaaacactagagatgagaggttccccaaccatgcaggcacagttccttcgagattgttctctcccaattcaaggacaagaagtgatgaaaggttttgcagcgatggtatgctccctgtcaactttgcagaagggatgctaaggtacttgagtgctgaaaggtttccaagtgaggcaggaatggagcctgccagctgattagaaccaagacctagtccaacaaggccagcaagatcacctatctcctctgggattcccccagtgaggttgctgaattgcaggttcagagtcatgaggtttgcaaggtttccaatctctgatgggatgcttccggtgagggtgttcatgccaaggctgagtaccctgaggccgcgcaacgagcagagctccggcggtatctcgccgtggaacctgttgttgtacagagcgaggatctcgaggccggtgcagttggcgagcgacgccgggatctgcccctggaaggcgttgtcactgaggttgaggtgtctgagctcagcgaggccgccgagctccggcgggaggacgccgtgcagccggttgccggcgaggtggagccgcctcaggtatgtgaggttgccgaggtccggtggcaccgtgccacggaggccaagccccggcagctccagcgccacgacgcggccgcggcgccggcctctcgcgccgcacgccacgccgcgccaccggcacacggggacggaccggttcccccacgtcggcggcggcggcgagccactgcccgtcgacatgcgcgccatgaacgccgtcagcgcgaggccgtcgtcgacgtcgaccgccgccgcggcggcggctgctgctagccacgccagtggccataccgcggcgagcaagagacgcttgccggcgagtgccattggtgtcactgtcacgtaagaacggtgtgcaaactgcatggaaattgctatactgatgcgagagttgatcatatctgtgcatataaagcctttttatatgattataggtacccattttatatcggtttctgtttctgtttatattagtatgattttcaaattgctaaatgataaagtctgcgcaaaattctctatagaaattattttacaatattctattttttaagtttgtaataattaaagttcaattaattatgtgttaatggttttgttgttttttttggctaatttcatcttcattttcgatgcatagacagttgctttcaatccaattccagtagtccattcttgtggaaatacatcactgaatttgtccacggtccacatttttggtttctggttatttctgccgcattgccagtttgttatggagttgctacttgctagtcttctgcagagaccatggaccagcttgattgattaaccagcgattgcgaggtaatttactaccatgctgaatcgctggacatacgaaaaaaaatcaagggctacaattatctgaacatgcaaagggaaattcaatgagtcagctctattttttttttttgaaggaagatgagtcagctctataggaaagcaaagcaatggctttcagggttgttgtctgatagtgggataactactggagcttatcctgttgatgcttattgaccagcgcaccaaggttgaccaattgtgctgcaacttgctgatgggcaaagcagcagcggcgcgagataactgaacatttcggcatttttgttgctgttaaatgtcgagagcattatttgtccattgtacgtgttggtgtaggcgagaaggcccccattcttatgtaaaaaggaaaccattatttttcaagtgatctgtctcaaaataatttgattctcaattcatcttagagagaatgaactaagtatagagaacatattttcctttggagcgcacgattatcaaaatacaggcataggaaaaatgcatgagtaaaatgtcatcgcactttaaatcctaaatcctaagtaaataaaacacagaaaaccatttggatggagcacacgaaaaatacacgattttgacaaagagaaaaattccaagaacttggagctcatattaggaatccttcaaaattccaataaaacatttcattccaaaggaatttttttttaaaaaaaactagcatactgcccgtgtatttgcaacgtgattttagttaaagaaaattattattaacatattgtcactatcccttaattgttatacatatttgttactaacatattattgatcatttgaccccccccccactatatctttttgaggcaattgcttattttaaccctgttacgaagtctaactactaattcgaccttatttttttaggtttgcttatttgacctcgtttttcaaaattgaagatgaagactgaccctattttgtgtaggcaagataacggtgttaactgagtgatgatttgtccttttaaccctggctcatttgactctattatatgaaagcatcttgtgtttggacattcttaacatatttataacgaatttgatatagccttgatagatttgtgacaattttgacagatttggtctcaatttattaaatttagtttcagtttgacaattttgactttaatttttttttaaaaaatgacaaaacggttgatatacaaaattatttctcctattttgtccatcccaaattagatacaataataaagcaaaagctcagcagcagtcaaagagattgaactcgatcacagctagggtcaacgtttcgagattgaactcaagaatgtgatgcccagacacagatagcaaccagtagagggcgttggcaacaagtatggcaggtgaaccaaaatggtagatggtggatacaggccctgtgaagatggcatcgccccattcgccggtcgccgatgagtaaacggataccaagatgaggtggggattgggatgggatagggttgattagtattgagggtattttggtcacttcagggttgtaaatttattattttcttttttctaaatgaagtactaacagtggattgaaaacagggtcaaacggaaactttcattttgaaaaacaaggttaaataaacaaacctaaaaaaaaggtcaaattggtatttaggctttaaaacagggtcaaataagcaattatctctacacataaactatcttaaaacttatttccaaatctgtctcgagcttctcgccaaaggttggcgcggccgcaaagatgacagtggcggggcttctcgccaaccggctcgagcagccaggggagtcaccctgggtggtggtggcagcaaccaccagatccataccgcctcggccggatctggcggggtggcggccggcagcgaggaaggcatcgtcaacagcggtggggatggcgacgacgacggcaatgtctcggcggcaagaggcggcggggatggcgacagcgatggggatggtggcagtggcggagaccgtagatccggcggcagggcgcttggatttggcacccccacgccggatccgaccggtggcggcacgagcgtgccggcgcaacctggcaagaggatggcgcagccgtgggtgacggtggcgacgggccggcgcgacgcggcaacgcggccagggagactcgtggcgatggccgcgacagtcggcagccgacgggaggagcggcgcggcccggctggccggccggcgccggcggaggcagtgcgcacacggaggcggcggcgcggcccgagagactcgcggtgacagtgggcagccagcggaaggaggagcggcagatggctggcctactggtggcggtagaggtagcacgcgtggaggtagcgcgcgtggtggcgcagctggcgacggcggaggtcggtgaggtgcggccagtggtggccgcggtgcgtggaggtgaggccgaggtgctggtgcagcacaacgaggcttgttggtgtggagacggtggtcggcgcaacgagtggaggccagctcggtgagacgtgaccagtggcagcgcgtggagactggctggcggggggcactggtgcagtggtgcccacgcgccggcggaggttcagatggcggtggagcaatggtgcatcagtggtagatcggcaggcggtggacgtcgggtgaaaacccagggcgacgatgatgttcgagcgtcattcccatcttgagggcgttgtcgtgttgttccacccctcaagtgtggttgccgagcgaaagcgtagtctcggttctctttgagaccttgatggacggcagcggcggcggtgttttcgtcgcttctttccttggagatgtcgtctaggcaccctcttgccgaaacccccaaagcaattggtgcaagcctggtctagattcatatcctcttgtgtcggcgtcctagcttctgcaagttggccacgttggaggtcctaggggagagaggtgttccattcttctctctgaccctctccctaaatcccaacgacttggatagagtggggttttgcactggttgtaagggtcgggttttgggcgatctcaactgtgttccattgttggcctagcggtggtcggtcacgctaagcggcggccagtcggatgctagccttctcctaggtctgtgattggcgctgtcggtgtgcggatggtggtatacttttttcgttttccttattacaaccttacagagttgtaatcttatatttttttctgctttatcaatagaacttcacgctgtctatcgttaaactttttttccaaatctgcctgcagctattggtgcgacagtgttgtttcagcctgcgagactgggtgacgtgtcacgtgtccaaaagattcaaatttagaaatgacttttggatttatttttaaaatttaaagtttgtaaattcgctggtggtgttcaaaagcagggacgatatgcataatgcatgatgtgtgttgggggtgggggagggggtgatctccctcttctttgtcggagaaagcttacccgagaaagaggagggctcatcggagagacaggagagagctcgcaagaaagccatcgtcgcttgcggtgaagaagacgaagagaggtggagagagagcgccgctagtctagacctgtgggagcagctgggaacgctactccaagggacaaattgtttttatttatttttgaacattttattttttaaaacttttaacaacatttattttcaaatctacactttttttttgtcacattagacatgataaaacaagactattacatcactctgactgatatgataacgttattttgctacgccactctagatgacgtaacagtgctgttttactaaaataagataaaatatcacgtcaactattggtgacgtgacaatattatttcgtcatatcagatgggatggcgtagtaaaaaaaagattcaaattcacaaataagtattgagataatctattattaaaatccaaaaattaaaaagttaaaaaagtaataaaaattcccggtagaccccccttgcttcccaccgtttctgctcttcaggcagctagctaagttcgtcccagttttgttcctactgaattttggagtagaacaaatctgcacgaatttttttttacactcgtcagtcgtcacacaatagaatggaacttaattatccgatcttaaactgatcgatactacttttttttccctctgaaagtgaccaatgcaataattaattaccaaaaggtgattagcacataatatagacgatcgatggacgcctgatcttcaatcgttatcgtgcgggctacctgcataaaataccttacacattggctgtttatctgatcaaatattcaaccacactagagaccttatctgtgagcaattcgagggcctgataattgtcaaagctttacagagtcaaaaagttcaggcgccaattttcctcgtggcgcgtagtgcctagcaacaaccaggctagcatgcgttcctccatgtcagccaaattatcagagcaaatttgataggattactattagcttcaaatcatatattcatatatagctaatctaatagctaattgatacaatagttaactataaatatatattacaccattaatacatgattctacctcttatacacataatatatattacacatcgttttccttctctctcctctcttacctcctttacacgtgttcatagctggcttatagcctgttattatatttcggcaactttgcaaaccattgaccgctagtctcaacagaatctgcaggaacaaatcgacaatctcttcgtcaggttgcagctgaaaatgtttgacgacgatgcagtacaagccaaggatcacaattcgcaaggcagagagagtctcaaagccactacgtttgccactacgagtctcggcgagctgaccagtgagtgagcgccacagcgcgcgcgcgtgcgcgggcgcggcaatggccgcactgctcgagtgcttcttgctcgccgtcgccgtcgtcctcgtcgctcatgcggcggcgccggcgccggcggcgtcgtctcggctgcctctgcctcctcctcctgctgctgctgctggtgatgtctccggctccgactccgaccgccgcgcgctcatggcgttcaagaagctcgtgagcggcgacccgtcgcaagccctggagtcatggggcgacggatcgacaccactgtgccggtggcgcggcgtgtcgtgcggcgtcgcggcggggcgccgccgcggccgcgtcgtggcgctggacctcgccggggccggcatcgccggcgaggtgagcccggcgctcggcaacctcacccacctgaggcggctccacctcccggagaaccgcctccacggcgcgctgccgtggcagctcggccgcctcggcgagctccggcatctcaacctcagccacaactccatcgccggccgcatcccgccgccgctgatctccggctgccggcgcctcaagaacgtcctcctccacggcaacaggctgcacggcgagctccccggcgagctcctctcctcgctgcgccgcctcgaggtactcgatcttggcaagaacacactgacaggaagcatccctcccgacattggcaaccttgtaagtctcaaacagctcgtcctagaattcaacaacctgacaggacagatcccatcacagataggcaaacttggcaacctcaccatgctaagcctcagctcaaatcagctgtcaggctccatccctgaatcgatcggaaacctctcggcattgaccgccattgccgccttttcgaacaacttgacagggagaattccgccattggagaggttgtcatctcttagttaccttggtttggcaagcaacaaccttggaggcaccattccttcttggttagggaacctctcgtcactgacagctctggatcttcagagcaatggctttgttggatgcatccctgaatctttaggtgaccttcagtttcttgaggcaatttcactggcagataataagcttcggtgtcggattcctgattcctttggaaacctccatgaactcgttgaactctatcttgataataatgagttggaaggatctttgccaatttccttgtttaatctctcctcccttgagatgctaaacatacaggataacaacctcactggtgtttttccacctgacatgggttacaagcttccaaacctgcagcaatttcttgtatctagaaaccaattccatggtctaatccctccatcattgtgcaatctctctatgatacaggtgattcagacagtagataacttcttgtcgggaacgattccgcaatgcttgggaagaaaccagaacatgctgtcagtagtgaacttcgatggaaatcagcttgaagcaaccaatgatgctgattggggcttcatgactagtctaaccaattgcagcaatatgatactgatagatgttagtatcaacaaactccaaggtgtgctaccaaaagcaattggtaatatgtcaacacaattggagtatttcggcataacaaacaacaatataacaggaacaatacctgaatcaatagggaacctcgtcaacttggatgaacttgacatggaaaacaatcttctcatggggagccttcccgcatctctcggcaatctcaagaagttgaatagattgtctttgtcaaataacaatttttcaggatccatcccagtaactcttggcaatcttacaaaacttacaatccttttgcttagtaccaatgcactgagtggagctataccttctactctcagcaattgtcctttagaaatggtggacctttcttacaacaacctttccggcccgataccgaaggaactttttcttatctccacaatatcaagtttcctgtatcttgcgcacaataaattaactgggaatttgccttcagaagtgggaaatctcaagaatcttgatgaactcgacctctctgataatacgatttcaggaaagatccctaccaccattggagaatgccagagcttacagtatctcaatttatctaggaacttcatcgaggacacaattcctccgtcactggaacaattaagggggctcctagtacttgatctttctcaaaataatttgtctggaacaatccctagattcctaggtagcatgacaggtctttctactctgaatctttcaagcaatgatttcgaaggtgaagttccaaaatatggaatatttcttaatgcaactgcaacctctgtcatgggaaacaatgacttgtgtggtggggcgcctcaactgaagttgccaaaatgctcaaatcaaactaaacatgggctgtcttcaaagatcatcataattatcattgcaggaagcacaattttgtttctcattctattcacatgctttgcgctacgtctaaggactaagcttagaagagcaaacccaaagataccgctctccgataagcaacatatgagagtttcttatgctcagttgtccaaagcaacaaatagttttgcatctgagaacctcattggagtgggcagctttggtgcagtgtaccaaggaagaattgggatctctgaccaacaattggtggttgcagtgaaggtgctcaacttgcaacaagctggtgcgtatcgaagttttgatgcagaatgtgaggctttgagatgtattcgccatcggaatcttgtaaagattcttacagtttgctcaggtattgatttccaaggtagtgacttcaaggcgcttgtatttgagttcctgccaaatggaaatttagaccagtggctacacaagcatcttgaggaagaaggtgaacctaaggtgctaaatctcgttgaaagactccaaattgcgatagatgtggcttctgcacttgaatacttacatcagcacaagccatgtccaattgttcactgtgatctgaagccaagcaatattcttcttgacaatgacatggttgctcatgttggtgattttgggcttgcaaggttccttcatcaagaacacagcaatagttcagataaatcaactggttggaatgcaataagaggaacaattggctatgttgccccaggtgtgcacaattctatcatcatcttgttgcatttgtttctttacttcattccacctaaataagcttactaagttctttatgtttgtttattccagagtatggattgggcaatgaagtctcaatccatggagacgtctacagctatggcatacttttgctggagatgttcactggaaaaaggccaacaaacagtgaattcggcgatgttcttactcttcatgagtatgtagaaacagcgctgccagaccaaacaactagtgtcattgaccaaagcctactagatgcgacatggaatagcgaaggaacagctcaaaagtaccacgacatcgaagagataagaactgagtgcattgtttcaattctgaaggtcggaatattgtgctcaaaagagataccaactgatcggatgcaaattggggatgcattgagagagttgcaggcaattagagataggtttgatacacatcagctatagtagcctatatcttgatgaagtggtgcagcatatcaaagtcatgcttgtgcatgaaatattctacttcgtactatttatctgttgagggtcatgcacttatcagtcaagtaagtctgcaagaagacactggaggctgaacatgctctactgaagattttaggagttggaagctaaaaacggatatcgagtatcatggaagaagcaaaacatcttcagctaaggaaaaggaggaagttaattgaaataaactagggcaaaatgctgtactacattatcaagcaaaaatattgtactcgagcagctacagtcagcttatggccacacctacacaacactctgtaatggctgagaggtatactaaataagagcctatagcaattcgtattgcagggcatccaattagctactcattttcgctcttcgcacatataattcttgactgagcaattcataaacatgtcaacatggcagtgcctgacttggctaatactgttgacaactgttgcaataagcagcacaagatagcgacgtaagaacctccatctgtcatagaagtagacatgagaattgttaacacaacttttgttctgaatattggaatttcttgttcaaattcaacgaatctcccacaaagtaagagatgcaaccaataagaaaaaggtttaacagggatttgctccgagaatggagcatcaacccatgaagcagtacaaggtatttccagtgcaggtcatcttgaaactattgcacaactcaaaaaaggtcaatcttgatccaggggctcttggctaaggccctggatgtggtctattctactgtagactggccctccccttaagagttaggtttagaattttggatcgattgatcacagccgaatttggaatgcaggaatcttgtcttgtccatgcaaaagatttgagcatttatatgcacttttaagaaaaatcatctgaaattcctgtgttcctaaggagccaaagtgacagagttagtctgtgtcattactcatacctgcgagcagcatatgcagtccaaattagttgatatgtgcagtccaaatgagaatgcttcccctccgatggctatattccttattgtataagtacactatagtagcatagcaccatattgccaatttgccatcaacgtcaaataattgacacgcacagctcagctcttctacaccagatatatgggaacaaacggaagacctttaatattgttccgtaaattatgcgtagaaatgtttcataaaggacaaatcaaggccggccagccagccagccggcctaattcatccttctgtcctgcatgaagccacatgagaatgctgttggcagaagattcagagtatcttgctacatgagtagatttagataacacacttactttaacccaaacaagctggcagcaaagtttgaccagggaacctgtaaacttctggtaggaggccggctatctgatgattgactaaagttgcaacagaacagaatgttggtaatcaatttactacaactgaagggtgttgaccaaagtgcaggtactacctgagaaagtgacaacttgattgggatccaagctattgatttatcttgacgaccaacacaccatgcttatattcaggcaggagaatatgtgttgtctctatagagcagaagcaaccattcctcccatgaactggtaaagctggactgagtagcctctgcaatcaccacctaagcttctgtttttgaaaatacacacctcgcttccttctttctagcaatggtggcgaccgggttctctttcttgctcacgctgctgctccttgcaactgctgttccaccagctcccacgaccagagctcagcctgccaccgaccaccttgcactgatggccttcaagtcgcaaataacccgtgatccgtcgtcagcaatggcctcgtggggtggcaaccaatcgctccatgtctgccaatggcgaggtgtgacgtgcggcatccagggacgctgccgtggccgtgtggtggcgctggacctcagcaaccttgatctttctggcaccattgatccttccataggcaacctcacctacctgagaaagcttgatctccctgtgaatcatctaactggtaccatcccttcagagcttggtcgtcttctcgacctccagcatgtcaacctgagctataattctctgcaaggtggcattccggcatcactgtcactatgccaacagcttgagaacatcagtctggcattcaaccacctatcaggagggatacctccagccatgggtgatttgtccatgctgcgcacagtccagttgcagtacaacatgcttgatggagcgatgcctcgcatgataggtaagctgggcagcttagaggtccttaacctctacaacaacagccttgcaggaagcattccgtcagagattggaaacctcaccagtctagtaagtcttatcctgagctacaatcacttgacaggttcagttccatcttctcttggtaaccttcagaggatcaagaatttgcaactgagggggaaccaactttcagggccagttccaacgttcttggggaacctatcttcactaaccattcttaatcttggcactaacagatttcagggggagattgtgtcattgcaaggactgtcatctctgactgccctaattttgcaagaaaacaaccttcatggtggcatcccttcttggctaggaaacctctcttcactagtttacctaagcttgggagggaacagattaactggaggaattcctgaatcattagcaaaacttgagaagctatctggacttgttcttgctgaaaacaatcttacaggtagcattcctccctccctaggaaatcttcattctctaacagatttgtacctagataggaatcagctcactgggtacattccttcttccatttccaatctctcctctcttagaatattcaatgtacgggataaccagttaacaggatcattaccaactggcaacagagtcaacttcccattgcttcaaatatttaatgcagggtacaatcagttcgagggtgccattccaacttggatgtgcaactcttctatgcttagctcattttcaatagaaatgaatatgatttcaggagtagttcctccttgcgttgatggcctaaatagtttgtcagtcctgacaattcaaaacaatcaactccaggcaaatgacagttatggttggggattcctttctagtttaactaatagtagtcagttggagtttctagatttcagcagcaacaaatttcgagggactctaccaaatgcagtagcaaatctttctacaaatttgaaagctttcgccctaagcgaaaacatgataagtggcaagatccctgaaggaattggaaaccttgttaatttattgtaccttttcatgagcaacaattcttttgagggtaatattcctagctcacttggtacactctggaagctgagtcatttagaccttggattcaataatctattgggccaaattccacctgcccttggtaatctcacatcgttgaataaactctatcttggacaaaattcacttagtgggcctctgccatccgatcttaaaaattgtactttagaaaaaattgatattcagcacaatatgctcagcggtccaattccaagggaggtttttctcatatctaccctgtctgatttcatgtacttccaaagcaacatgttcagtgggtcactaccattggaaatcagtaacttgaaaaatattgcagacatcgatttctctaataaccaaatttctggtgaaattcctccatctattggtgattgtcaaagcctgcaatattttaagatacaggggaacttccttcaagggccaatcccagcatcagtgagtcggctgaaaggtcttcaagtacttgatctttcacacaacaacttttctggagacattcctcaatttctagcaagcatgaacggcctagctagtttgaacctctcattcaaccattttgaagggccagttcctaatgatgggatatttctcaatataaatgaaactgcaattgaagggaatgaaggcttgtgtgggggtatacctgatttgaagctgcctctttgctccactcactccaccaaaaagcggtctttgaagcttatcgtagcaatttccataagcagtggaatcctattgcttatcttgcttttagctctatttgcattctggcaaaggaataagacacaagcaaaatcggacttggcacttatcaatgattcgcatctaagagtatcttatgttgaattagtcaatgcaacaaatgtttttgctcctgataacctcattggagtaggaagctttggatcagtgtacaaaggacgaatgacgatccaagaccaagaagtaactgttgcagttaaagtgctgaatctccaacagcgtggggcttctcaaagcttcattgcagaatgtgaggctctgagatgtgttcggcatcgaaatcttgtgaagatcctaacagtctgctcaagtattgatattcagggccatgacttcaaggctcttgtatatgagttcatgccaaatggaaatttggaccaatggctacaccagcatcttgaggaaaatggggaagacaaggttttaaatatcatcaaaaggctcgacattgccattgatgtggtttctgcacttgattatcttcaccaacataggccattgccaattattcactgtgatctcaagccaagcaatattctcctagatagtgaaatggttgctcacgttggtgattttgggcttgcaagagtcctgcatcaagaccatagtgacatgttagagaaatcaagtggctgggctacaatgagaggaacaattggatatgctgctccaggtatgcttctaacagctacaatccacggttttctttctaatttattcacaaacctttccattgatccatacttaagtagatcgttttgctattcagatgtgtgcaatttgttatgaaaaactcaaattcttgcaaatgataattatgcagcagtgtaaattatatattattagactgaagcccacatataaatttaaatataaatgcttaaacatgcaacaacgtcctttatgtaacattttcttatgattacagagtacggtttgggcaatgaggtttcaattctgggtgatgtctacagctatggtatactgttgctggagatgtttaccggaaaaagaccaactggcactgaatttagagaagctctcagccttcataattatgtaaagatggcacttccagacaatgtgatcgatattgcagaccaacacttactatcagagaacaatgatggagaagaaataaactcagatggcaaaagaacaagagacacgagaatagcctgcatcacatcaattctgcagattggagtttcctgctcaaaggaatctccagcagatcgcatgcatattggagaagctttgaaagaattgcagagaacaaaagacaagtttagcttgtccctgcgttgaagcatcaaatctctgaataatttggcataataatccccaggctataatagatatttacagcctagcaaccgaagccttatcagcataggttcaggttgtatgagtagcttcatgatgttcacacatgcagggtgctgttactgaacaaaatataagaaccataaaccatttggcatttgcaggaagaatatgtaaatcgactaactgcacatacagttttatgttttttattttatttttttgcttgtagcctacaaaactattttgatggaagcattcgatatgttacagcacgcgagttcacagaaattacactagcggtccttaaacttgtaacgaagttttacataggtccacgaacttgcaaaacgtgtatcgagatccttaaacttagtttaatgtatcatcccaatccaaagcctggtttgaccgtggtcttgcctatgtggcatgccacgtggatgatgacatggctaaattttctttttcccttttttttctccccatcttttctctccttcctcacctagcgtggagaaaactgcggcggaagggagaggaaggaggcaaaatggagaaaaaaaaagataagaagggagaaaaaaaggaagaagagagaaaaaataaaaaagtccatgtcatcgtccacgtagcatgccacgtagacaagaccacggtcaaacgaggctttggaccagaatggtacattaaaccaagtttagggatctcgatgtacgttttgcaagtttgtggatctaagtgaaactccattacaagttaaggccgtgctccctgaaaaatctcaattccaattgttccgtactgcaattgcactaaactaaccaaaaggaatggccatttaccaagatccataccccatacccatagtataatgtttctgtttccccatttggtcgagaagttgcaaactcagatgcatcaacatcatcccaagcaaacgagagagtatcagtgtattcacaaaagaaaaaaaaaacagtttccgtgtttaccccttcgatgaaagcgggggaggagaaagcggaggcgggggtggagagtcgccaccgagtcgaccagttgagacgctgggtggagaagggggcctacgcaggcggcggccgccggactccggcgatctcggcggcgtgattagccgaccgccctgcctagctagaacaaaaacccagaagggtaaaggaaaaatcgcaatgcgcgctcgatatatacctcgtggtggcggagcatgaggcgtgcggggggcggagacgatcgcggatgcccccaccatcgccgtcagccagggcgactcgccgccgtacgcgcgccggagaggagacggcggcggagttttcccggagaagacgccgaggcggcctgcagagcaggctcgttgtagcccagcccacctgtcaaatcaccagggcccaatcctgtacgggcctcaaggaggcagcaataatcccgtcccggcccaaatgtatgggccgcccagaaaaataagtcttttttacattcctcaactcttatccactaattaaagggaaaagtacacgcaaggtccctcaacttgtcagcgagatacaaaatcgtccctgaactgcaaaaccggacatccggcgtcccccaacttacaaaaccggtcacaaaaggtccctcagcggttttgaccccggttttgtcccacgtggcggctgactcagcatgggacccacgtgggccccacaggtcatggagaccacgtcagcaccctctctctttttctcctctctctctctcctgccttcccctcgctctctgctctcgcacaggcggctgcgcgcgcggccggagggtggtgcggccggcgacggcggctccctggtggcggcgcgcgggctcagggcagcgcgagctcgccggcctcctcgtccccctcgtgcggtcggtgatggcggacgagcgacgagaagcaggcggtgcgacgcccccgccgcgtacagtggcgcggtgaccgtggccgccatcgcctatcagaggagacctccgcccgcgctcgaagccgccgacgacgatgaggccgagcggcgcggagtcgtcggcgccgccgctccccatccgcagccgcactcgcctgccgccgccgagcttgctgccccgtgtctccgccgccgcgtcgccgcccagcacgaacctcacgctcgcgctcgcgctcgcgttcgccgggtggggagccggccggtcaatctcctctccgccgctccttccccgtcggccgcgccgcccggagatcctcagcgtcgaggcggccgcggcggagacggcctcccgctcccactgccgctgccgccgcggctccttgctggttgcaagacgacgacggatgatgcgacggcgcggcgccgtcgaatcctctgagcagcttgtcgattccttcacgcaccgcagcgtggtgtggaacgcggcggcgtccgggacaagccgcaggatctcgtcggccacgcggacgccgttgaggctgcgcaccgtggcgaggtcaaggccgcgcccgtcgccgccgccttgctcccctgctcccgcgtcgtcgccgccgccaccttgctcccctggtcggacggccatcgcgcctacaacctcctggacgacggccacgacaccgtccaggccaacgtcgagctcggcctcgctgtcgactcccgcgagtacggcatcggcgccccaggtagcaaagttcgtcgggctcaagggctacgggctcgccgtcgtcggcagggttccggcctccccgcgcctccgccgtgcttccccactatggccgccgccgccgccgtcgccgtcgtggcgccgccctcctcctctcctgctcgccccggctagctttgcagataagtgagagagagagatgacgaagggagaggaagggaaagagaagagagagaggaggctgacgtggtctccatgacatgtggggcccacgtgggtcctacgctgagtcagccgctacgtgggacaaaaccggggtgaaaaccgccgagggaccttttgtgaccggttttgtaagttgggggacgccggatgtctggttttacggtttagggacgattttgtatctcgctgacaagttgagggaccttgcgtgtacttttcccctaattaaacaggggcatgaattgagggaatcttatagacttattctaaccataagcccgttccggcccaaaccgcacgtacaccgcaatcctttttcggcccgctttatccagtggccatcaccgagtgcagccggactgccggagccagagcagccgtcgccgccgccggcgaggcgacgcaacgcgcaaacacggtggagcttctcgacgtggacaggatggaaatcatggcgtcggggcggagtgcactcctcggcggcaagccagcgaccatgggtaactcagtgtagacaatttttggagctactgcctccattttataatgtaagactttttagcattgtccacattcatatagattttaataaatctaaatatatatgtgtttagattcattaacatctatacaaatatgtgcaatgctagaaagtcttacattatgaaacggtggaagtaatttggttttctgttggcgaatttctatccattatcttaaaaataaattaattatgatggttttttttaaaaaaaatgttttctgtttgaaagtcatgctagtacagttataattgttcggtgtgaattgactgaacaaactctggcagagtcgttataattgacgaaaacttaaaatttaaattgttactacattcactataacttcgctcctcctctactccttggcacaaattcaaccaatcaaaatgatttgaagattggaaaacccttgtttttatcttctagtttgaagcttctatctttgccttttcaatgggcatagtctcaatcttcgtcatagttctaaccatcatgtatatcaacagagatcactttataaccacttttaattctaccaatttttgacatattttgtgttactaaattttgatagtgttggatatgtttggtttaaagccttaccaaatttcatcagaaatgttaagagtagagacttctagaactaccaaaatttagtaagatagtactgataaaatatgcttggtttgttgagctaccaaaatttggtaggtttgaaagtggcaaaaaagaaaaaaaataaacaagctctaaataaccaccttacatgcttagattttcatgacctaagtacctaacttatgttagtcaatacaagttaaacacgcacagtcgcacaaccgtccgaaggattcacacttgacaaacttcaaataaaaccaaaatacatggacccgactgatattaatttccacatggtctcgatcatagctaggggcatccaattctgcgctaatccttttcatccaactaggaaggcattttatttattgttatatgaaatagtgctaaaagaagtcatatctcaccatttctacatcgtgagatagatcgtagacttcaatatacttaaattataagaatgtctcccagaattaaaaacactttgtcccgattacatataaattctcctattattgtaacaactcattatcactattttaaaagctcgctaactatcaatacatgaaattgcgcataataaaataagcctaatatatcattaatacactacttagctaagtgtttatgtctcacttatttccaaatccacatataaatattctaaaaatatcactaacgggtgaagccgatcatagccgtagagactttctttctctattaccttgaaagttgggtagccatgtcccctcaagattagcccgaagcacaattttaatgtctactccctccgtcctaaaaaaggcaaaccctgggtttccgtgtccaacttaaactgtccgtcttatatgaaatttttttataattcgcattttcattgttgttagatgataaaacatgattaatattttatgcgtgacttgtctttttaatttttttataattttttcaaataagacggacggtcaaacgttgggcacggaaaccagggtttgtcttttattgggacggagggagtaatttactataacactttcatagagtcctataacacacttgggccactcaactcggccatttgtatgccacgttagagggtaaataacgggtccaccaatttaaatgaaaatcgatggtgagattatacagtaccatgtgatggcttaggagcatttgtagcagcgtcatatggcgacttaggagtattcgtagaaagtttatgaacgtttagtatataatagtttttcttgctgcgaatagtagtaccgaagctttatttctttttcattctaacgtacgtttgtatatgtacttatgtttttttcacggtatatacatctaatctaatggtctaaaataacgggtccgctaatttaaatgaaaatcgacagtgagattatattaccacatggcggtctaggagtatttgtagaaacgccacatgaagacttagtactgttttgtagatcacaaattggatatataattttaaaataatttgaaaagatgaacatttaaagatggttgattttatatttatattatagatctagtttaacactgcatctatatatttgtgaatgtgaagtaatatatttcatctttatatcgtagatagttctattttaaagaccgtcgatttttttatggtactaagtacttatattttattttggcttatagtaagtacgtgcatattttttttttcttccggcaaacattatgcacatgagaaaggcatgagaaaggtattacatatttaatagtaaaaaaaacaggtccaataatttataaatcgataacatatatggataaaataatggatcgaaaatcgttcaattgcatgtgtatatttgtgggccaatatatctttatattgtagagcgatatttgcttttttgatagtactaagcatgtatgctttattttggttgtcgtatgtacatacatacgttctattcctctggcaaacagtacagagaaagatattatatatactagtaatcgtgcacgtgcaaggcacgttttttttaacatttataataggagagaataaactatagagtaaatttcactttcaatcatttttatcaccattgtttgctttggactgggtaatcttgtatttgttccacttttgattaccgactctcttttaacgtatatgaaagattttgagtacgtcggctcctatttatcaatgaactcccacagcaatatatagaccaattcttttgacatatgacaagttggattaggtggttgaaaaagttgagggtagtctaaaatgccacaaaggtaaaattacctgtccgaaagtgaaacattgattaaagagtggttcaaagcgaaacatcgataataaaaggttgtcgaaggagaaatttactcgataggaatcatgcatacagggtcatcgtcagcacactatatgtttgctccaagcctccaaatcatcagctccgccaccaggcatcttgaccaagctctagcacccctgatgttacttagcagcaacacctgcatttctgctggtatatgtgccaaagaaatgacttataccatgacatgactaattatcaaacacacagttagcaaaagcatgtagacctgcacaattatcttgtcggttttctcttcagggttgagcaacacataattggacgtcatcatgatgtatatatgcagcaaggggtcgagtattctccaagaaagaaaaaaaaaacaaaataatgtatcttatcatctctgactacacaaatgctcactatgaaatcttatgagaaagaccaaacaataacgggtaactaagaatgctgttaataagcttaaacatgaattttacctcaaggttccaatatatactgtagtaatagctcttaaaaacagtgtaccaaacagtgaaatgccatggtaaaccatgacaagattttagcaaaatattcagttgttgtctacaatgtcaacctgcattataaacaacagaagtaagccagtatatttagatgcctaatagaattacacaaatactttttgatatcacggtttttcttattgttatataccagaaacagtttacaaacctaatttacagttttattatgtaagggaagaaaaagagatttgatacttgcatgcattacataaaaattttgaccatgtatgctagcattttactaagcaaatctgaacattaattgccacaatacaaaaaaagctatgtataatttctcaatactcgaacaaaatctgaaacaccatgatgtgatcttcattggttgaaggagtacatagtgatacccgaacttcctgactggcatgtacaattttgtttttctataaaaatatagtatcgtgcataattcgacaatgtaatatatgtatatccatatgcaaaagaaattgcatacctgacataatagtagggagaagtggaggacttctcaggcacagatcatcacaaggaatgaaacaaacgaagactgctagtggcagataaatcacttcgccctggaaacaacgctggaggcctgctagcgaggttatcagtaaagaacagtatgcggcaacatattagtcaggacttgacacaattattcggaaacacacgcacgtatgttgaaataaaaaaaaaatggagaggctgatttacatattgaaatttagggctttgcaaacgtgaacgtgccaactacagaaacatgtcattacctgttcaatccgctggatttggtgtggagcttccagtggcgctatccattttagtagacagagaaaggtagaaataagtgaccacctgcatatatacatgagcacagtttgaaatcaacagttgatcgatcaatatgattactgattatctcgggattgatcaggtggtgatattttgcatgcatgcaatgagaaattagctgattacacaaggttataactctgttcttctacattattaaattatgttgtgggtgatgaaaataagtttcacgtctcctatagactataatcagaatttttgtttacctgcagagaaagagtatgaactatgtacaacattgaagtgtttagtgtcagcaaactggactgcaccctgaattcgtgaagaaaggagaacacaatggatcaaattgcttgcaatagacagtacctaagcaggattttgctgaacacctgcaactcacgcaaagggaattagcatcagcaattctatcaacagtttaagagattcccatggattacaattcgccacataatttgaagataaaacacaaatgcatattgaaaatcaacacacaaaaaagcaaaaggccaatatttgttcagataaaaagtattgtatccacgattgaccctgcaacggatgatcgacgggcaaatcaaagccaggcggccaaatcaagcgtccttcatcttcttggtggagatggatggcttgtcggtgggctgaggagtctgaaccatgggttatgaaccgagagattgaaggaagagcaggcgccaccgcggccggcagagaagcaacgactgaggacgctgccgcgaagattgaggaacaacaccaggtaggagggtaagcagatccttttcacatcggagtaggacggcaggaagcgcgctctcacctcgacgctggcgggggaggctgcgatctgcggtgggatgacgtgatttgcgatgagagaaggcgcacggcggcagctagcgcacgatttgcaggtaggtggtgggaggcgtagcggcttccgtagcatgtgctatagcggcgacaggagcgtgcgaggaggcattggcgcggcagcggtgtcatcgggctgtgtctagcggcagggatagcgcttagaggcggtgtttctgcgctagaatcgcgcgtccgctcggtggggatggggaatcagtgatttggatggagcaaaatcggatttggattccactgttgcattgcatcgtaacacagagcagccccacagccgtctcgagcggttagatgtacagatcggacggctaaataaaggaatgggaagatgttgatttcacccgtaggattgcaaggagacaactcctcctatatatatatatatatatatatatatatatatatatatatagacacacgcgcgcgcgcgcacacacatataatatattaactgaaaatcgatgcatgtatagatctaatctaacggtataaaataatgggtccaccaatttaaatgaaaatcgacggtgagattagactgtgccatgtgacgatctaagagtgtttgtaggagtgccacgtggcagcttgagagcgtttgtaggaagtttaatgatttttagtatataactaggatgatagcccacgcgaatgcgcgggcatacgtattagtttgttctgaaaatagttctaacaaaataaagtgaaattaaggtaaggtgttttctatttttaacagggtgttcattgtatctctttttgaagaaatctcgataaacttttgctggcaataaatgttttttaccaccttgtcaatcctctttttaattgattcatatatatgtgtaattcgttatgcatgtgaatcaataatgataagttcttttaaaactattagttatattttgaatgtagtggttgagtgattataatttcgaatttgttttcaaatcaaattattgtgttattctaaattttcattttaaggattttaatttgtacttaatctcgtatcgtgttgtatttggactcatcttttaatatttattttattattattccaaattttagatatttataacttatacttttatatggactgttttatattatacatgggatcttgttatacattttttaatagttttaatggttttttttaaaaaaaaattgaatgtgtattttaatcaaattgattattttttctgaatttaattctgaactcctcggcgatagaaacgtctctctctggccctcctctcagtcctttgtccttcacctaatcatctagcatgctattaggcttagaagtcatggaaagtctatgctggcgcttccgtcggtgtccacctcgctaaggttgtgttcttcccccctcctttcccaacttaactctctcgttttcggtgcacatgttttccaaactaataaatggtgttttttctaaaagttttctatagaaaaattgctttagaaacatattaatccattttataaaaaatttaactaatacttaattaataataatctaatgtaatgagtcgctttgttttacgtgcgtgggagagattagctccaaaacctatctaatgaacacaacctaataatatcttgcagctccgcctccgttgagttcaggcccagggtatccaccatggttccaagctctttgatggtggttgaatctagactttagactcacatatttgaattcatttgtcttttcacagtgcaaattttgctcaaatatttgtagtcataatggctacattatctaaattttatatagtaaatatgggtaaatggatcttgaattatgtatttaattataaataacatgacaaaatgcaaataaattgagaaaagtgcatgtaacttgagagtcatgatcatttaactatctgattattattatttatatattatatgttagctagaaaataggaaatgttggctcgaaaataggagaggagactgggatcccggaggagagagttggagggttgagagactacgtacgtacatgtgtgcccacacacggcggggttgggggtaccatattttcgtgtattgggggtaccatatttttttttgagagatctaacggttaaaattagtgggtccgcctatttaaagaaatatcaatggttagtctttttcttttttatcaaaacttttaggattttttttctaatttattagatcgtcaaaaggcatcttaagaacatttgtaaaatgcgacgtgacagtttgagagcatttgtagggagttcaatgaacttttaacttttagtatataatagatgtttaatggattttcagtatataatatatagatagatgtgtaaagaatataatgcagtaaactttcttcaaacattatatacgtttatgatgatgcagtctaggtttgcaaagttataattgtttgtttttaataatgaatgttatttcaattatccttagaaattataaaaggaaaggagagaaatatggacgtgataagggtgagcggtttcgcacgtgcgtacgtacttacttcatatgtacggacttatgggagagctggggccgttgtacattaatacaagggtttataatatcggacccactaatttaagtgaatattttaagggttagatattttgcttttgtagaatttccattatttatttatcagagcgccacgtggtagcttaggagtatttgtaggggtggcatgtagcgacttaggaccgatttaagtgaatatcgatggacaaatatttttgttacaaaataatctaaaataatgggtacataatataatataatggtgtaaactttattttcaaatattgtagagctaatttatttatgttcacttgtagagatttgtatgctggtatattctatatttgtaaagtgacttttattcaaaatttattatcacttattattattattattagtattattattattattagtactactactattattattattatctcaattatataccggaaaaaaagagaaagaatagtaacgtaccttggaaaaaaaaggttatgtacgtgcatgcaccccctttaacagatcgcatgcaagcagtaacgtacctatatatggaatggaactgaggagttattttgagataaatctaatctaacggtttataatattggacccaccgatttaagtgaaaatcgagggatagatatttttcttttttctcagattttctagaattttctctaatttattagagcgccacgtggcggtttgagagcgttttgaggaagcttcatggaattttagtatataatagatagatagatagatagatagatagatagaagatagatagatagatagatagatagatagatagatagatagatagatagttctccgttcaataaacaattgcatcctttgttcctcggctcagctctcaaattcctaccaacaaggagggttgtgtatccctcccgggccgcctgaaaacgtacgtaaatccaaaatcagatttaatcaaatcgtgcaagcaaaagaaaactatagctactgatatgtattctcctcagagttgcctctctttagctctggtaatgacacttgtaatgcaaacaattgatcagctagctacaaatcataatcccacatgccatcacctggggggacagacactaatgcatgatcgctcgggcatgccccccccccccccccttttgcctgtccgtacatactaaatatatacacaaagatataggtataaagtttgtatatgtacgtatacaaattttaattaaggacagttaacaaagaacatgttgttcattaaaattggtttactccagacagcatagatcatgagtcctcttggctcatgagaaatgaaacctctgtaagggggttggtctccatgcgtataaagtatattttgcaaccatatatcaatttggtcctcagttaaacatcgtgtaccgtatatgcatagtttcaaccatgtcatctatgtaccatgatctaaggcagcataaagtatatttgcaaccatgatttaattttttttaaccatggtatttaccatcaaacctttagctgtaaactatactgatattttcatccatgtcatctgcacatgatgttgcctgtaacagatcatacggaatgggcattgactaatacatatatacttcaattttttcagatcagacaaagaagtaactccaacaagaatttactgagaatgaggagatggatgtccatggataactacttttggaagatgttgaaactatatattggattatgttattttgctatgtgatggactgcacaaactacatgttggatgattttattttcctatgttgagacaatttggactggtgatgtattgttaagcctatttgaaacctttgtaatggactgtgaaactatttggactattaaagctatgtgatgacttgtaatggatttattgatgtatgcagttgtaatggactgattgcttgcaagattacttttatattttgaaaatcatgaattatcttgctgcaaaactgggctctgcgcggcccaagttttttgtcccccaaatttcggaatcttcggacgaaatttcaaatttgaattaaaaatttcgtacgaaaaatcatgaaatttcggtgattttggttatttcgacacccccccccccccccccacacacacacacagaacaaaaagcaccatttcaaaactgcaaacccctgatacaaggaaagctccgttctggcgtgtcgtcgccggaccgccgtcgctgggccacggaattcgacagctccgacgacggcggcgacatggcgcagggcggacggcattgggagcgactgggtcggtcgtccctccgctcgtatgcggcgcgggcaaccacgggtaacccttctttagagcttatattatattattattccttttcagcgactaagtcatgcatctagagttgatgtaaatttcattggattggtcgaacaaatccaggaaatgtcattgctgacgaaatctttaaaaatcttaattttgtacatttgacttgactgcgtcctggtcttctctaagcctggagcacaaaaattgtacctacaaaaaacgacggggagattggaacccttgttttcgccttcaagttttaacatgtaaacatcgacctctctcaagtcgtcgagcaccttgtctcaagctctttgcacatggccagaggattgtctcattagctgacattgcaatgcaactaatctggccgcttcctttgattcttgctaaattacttcttctttgttcttgtaaacgacgcttcccaattctcgtaatctgtgtgcacaagttcagcaatgccgctgtgtcttgcgtcttcctctgtctgtctcacgttgctgctccagaggcgaatgcagggtagtgtgcatccctacttcaattcgatgaaaggcagtattagcagtatcccgggtgcactctgtcaacaagttcagagaaagtgtcaacataatcagaatgccataatacactaatactttcatctttaaaaagacagattacataatattccgtctatgttgattgtagcaatgatttagttattataccgtacatttatccatccagggtcccgcctcatctcatatattttttattttttcttttggaagagaaatctcatataaaaatttcaggccatgctagcatttaccaattctgaaaataggcacacactgtgacacatgagactttatttacagggacatttaactcgctgtctatgacatgtgggccctcatgtgtctatgacatatgggtctagtagcaaataatttagcaccactcgtaagagtggcaaatagttaattattccttatttacacaaagggtgtgcacaaggtacattggctatttggcaaatctatcttgctagcaatactgtggtacaagcaaatatgtgtgtccggtgcttattagggttcaagaatgaaaaaaaagaggggtacagtgtcatgcttgctcactttgtgctgggtgaacagcacacagtgactagacgcagacaagtagaaatgtaaacagtggaagaagaaaaaaaggaaaaactaaaaacaggacacagtacggtagcacatgatctacacgacctcattttacaggtacatgctgattgatcaaaatacaattaacccagaaaaaatgatacgcacacaaactcatattcttttttttttgttctgtttttataaagcacgaattgggctcgccatcgacagcactacttatatatgctcggcgaaaatatcgataggactctgatttctatctgtgatatataggtagcgatcgatctcgtgatctcttctcaccggatatatttaatttcgacctccaatttgatcgagatgttaccacacacagggcgtctgacaaatgccaaacagccagaaagccctatcaagtattttgcctatccctgcacaattgaacaacaaaccagggttaattagactgccacaggagagatgacctatatatcgacaaaaccgagaacaaggtaatttaaactgcaaatcatctaaagaagaaattaaggtacaaagggaggagatggaatgtgcatttgctcaagtcactagtatgatcctagctgctgtaccagcatgttgaatggggtgttgtcactttcgtttgattggttgagctctgttccagttttctcattcgagtaactttgtttggtacaaatactagttatcgtcaaatttatatatgtttgagtgggtagggctgtcattgtgctcccaagtcccaacaaaccgtgttcgactctcgacacactctttttgcttcttagggctgttcggctggactagctccaagatagcaggggctgtagcagctgcagctgcagtcccagcttaccgaatatgcccttaatatatcgatattatattaaaggttttgttttaatataatggcgctgttttatcatcaaaaggactgccctttttattgatgtgtggcggattttagtgcagaaaatttgcatatttattaaaagaatgtttgcatatggaggctccagggccagtaggaaaccagagagagagagattgatggctcaattcttcttgaaacatctcccactccagctccagtttcttatttttcttttcaatggaagattatggagcccattgtctctgtctctgtaatgtgttctttgggccaagccagattgtatcccttgtctgaaaaaggtcataaacttgagtacttgacccatgcaaagctctagattttgcagtgctttgcttctattcgcagtaaggttttgccactgaaaatttccgtgctcagatagtcggatgccaagtgcggccattatggagcccataaaaaggagttccagtatatcattaccatagcatctccactctggcaagacagttcatgtgtgcaattcctcccattctccaattttcatagaccactcttgaaatttatgcagttccgtgggcacatctgtttcagagccattagagcagaattggcacaaggtaatcaatcaataggtccctttcgtttggtttctgtgaaatattcttccagtgatcgatcacatctcatgatgaagttcttaaactttcattctgtcagtccctatatatacatacatcatgatgatggttaaacttcaatttggagtaataatacttatgttacgttacctcaataggctttttttcatcggagtggaggaagaatgcgtagaaccctccaagcacagttgctgcggccatggcccaaaccagcacctgaaccgggaaaggcatgatggccgccactttatatgaaaacacggcggtgagcatcgtcgtcaggagccacaccgccgtcttgatgtggtggcggcgaggcgactccggcggcgtcttctcaaataatcggaggaagtagaagagcgatacgaggtcaacgtaggagaagaccacgaagaagatggttgccaagtctctatctgatctgtacactgccattcccgagttgaaggtcaggaaggcgaagccgaggagcgtcaggggagataaccccatgtcatgctgctccgccggcgcctgcggatcgcgcagaggttgctctagatggccctgctccatggatttcagaggtgatgttactagctttgaactcattagcacgttcaggttagtcctcctaggtgggttggatcctttcttgatcggggctgttacagatctgcaaattatggagaagatgattaagatcagatcgttgatcgaggtagtagaaataggcacatggattgtcagtctatcagaggctatgggcagcatgccctgcactaataaatggccacagcggaaacgactacgcaactcgtggttttgtgtaaaactaaatggcgggaaaatgattgcctgtgacgtattaatagttttgttcaatttgaatcttaaacttttaattcatgagaatcatataaatatgattcagattaatatatgtgcacctcaacattttctaatgcagttctaaattataaatcattgattttagcacctacaatttggtgttccggtatcgaaattggttttttttttaaaaaaaagagttatcttgaaactttctaaatatattttagataaatggtaggtaatattgttttcatcaatatgttttcttttgcaatcatggtttaattatgaaagatgatactttattacatgcactataatttacacatctctatctcttctctactattataaaaattaaagatgtttttgccggtacttcggtacgtcatccgtatttgagttggtttttaatctcgtttgcttttggaaataatttccatatttgagtcggttttacagttgttcgcttttggaaatataggagtcatataagaaatctctttataaaaaaaacatgcatgctaactttaaacgatcggattgctaactgaagctcatggttttctaaaatatatactcctatatccaatcgaatttccatattgaattttaccttaactaaatcatataataataataagattaaatagccttcaccctttgcaacgcaaaggtcttttctttctagtctttaaaaaatgaaaaaaatacagagtgcaatatttaaagcgagagtataactaaagcatgtaaattggtatgcagggaattttgataattccatttgatccaactgttttttagacgtttagctaagtgtttagtgaactattactacttttattgcaaagacaaatattattaagtttaacatataaaatgattaggagagaaataacacgacttaaattagaaaataatttgagtgaacagagcgctagcttaaattaagttcaattaagatgtgtctagagaattcgaatgaaggccgggcaattagaagatcggaaggagctggtgattgagcacaaggtggcaaattttagaaacacagaaaaatattgcattacataaatctgaaaatgccgaatagggtgatcattttcataaacagcacttgcaggccagatactcaaaatgtaatgaatccggacaatctgagtaaagaatggccaggaaaacttccaagtccatttagcctgagacgacgaacagcagcggaacagatcgagaacactttacatatcaagattaatcgcgcgcaatatatgggcgtcacttaagcaagcaaatagtaggtatataggattaatcaccggaagaagataaccgccgccgccgaagcagctagcaggcacaaggcgcaagatcaagctcgctcgcgcgacgccggtgccgtctggtaatcgacgaagctggaagtaaacctacactatatgtgtcacaaaagaaaaaccgtcactaattgttgtcatggaaacttcagcaagcgaaacacggtagcttttatagtcgatgcgaatgcgtcattttcgtcgtgaccgagacagcgatgacctcgataatggacaaaggaagcttcgcggaagctgcggtttttattatccccttcatcacgccgaatatgaaaagacaatttggcgaatcttgccaaccgacttttagcccacgatgcagactactgactttttccggcactagtagtactataatcaatcttattcgttttttattttattgagaggctactggtaattgttaggtcgaatcaaaggatggaacttgtaggaaattccgctcgagaagacgacgacacagcttaattagagcgagtttaatactatagctaactacgggctacaaatcatttatagtcaatttaatagccgattcatacaatagttacatataaatatatactacacgcttaatacttggtcccaccaatcatacacacatacatcttatagtctgtgttacagctggctataaatctgtaaatcgttgctcttctttcctattttaacttttcgaaatgtgtttataactagcttatagtcaggtacaatagcggactataaactagctataaacaccttttaaggagataaaaaagggagagaagaacagcggactacagatttgtggtaagctataacatggactccaagatataatgtgtgtatgacagatatgatcaaatattaataatatagtatatatttataggtaactatttatatgaattgactattgaactaactttatatgatttagagttagtatttggtggtactattaacttgctctacaattctgctatagcgatcatatcactcacatctgactctaccacggggggcctaatgggcgatcgatcgccaaggcgatccccgctcccccataggcactcctcccacttctccccttcctccttcccttcttctcttcctactacagtacaccaaaaaaagtttttaaaaaacaaaaagttagaaaaaattatgtataaaaaaattgaattcaaattcaaatttgaatcgggtatgtaaacttttgatttataaactttggatctataaactttaggtgtataaactttagatgtatagaaatactatatatagaaaatatttgaattcaaattcaaatttgaatcggatataattcaaattcaaatttgaatcgggtatataaactttacgtctataaactttaggtgtataaactttagatgtatagaaatactatagatgaaaaatatttgaattcaaattcaaatttgaattggatatttgaattcaagttcaaatttgaatcagatataattcaaattcaaatttgaatcggatatataaactttaggtctataaactttaggtctataaactttagatgtatagaaatactataatatataaaaaatatttgaattcaaattcaaatttgaatcggatatataaacttttgatttataaacttttggtctctaaactttagatgtgtaaacttgagatgtataaactttaggtgcataaatttactaaaataagaaagtaatgcggtgccaaaaaagaaaaccaggtggagggagggggtgggaaatctgatcactctgggcgggcgagcgcgatcgctcgcccagtagcatttctgctctaccacatccatctatcatcgtgcataagcttcctatcatacggatccgcgagcagccgctgtagctcactactagaaaaacaatttttagcaacgttagccttttattttttattaggcgggtatgactctcggagctaaatgtccatctacaaaaatataaatcggggtggatttttgtcatccgcttgcaaaaatcttttttccagccagattacttaagagatccgtcaacgaaaatacctttgtttttgcatgcggatctcttaagtgatccatttggaaaaattgtggtccgcttgcaaaaatcatgcctccacaaaaaaaaaatctagtcatccttatcttctcctccatcattcttatcctctcctctccaccactcatttccctcccctcccctcccctcctctctctctctcacttagcagaaatcctccgcctccatccctcatcgaagttggctccctcttccccgcctccatgactgccgccaccacgacgactaccgcgaccacgacgcgaggacaacgacgacgactgtcgcgaggatgacaacgacacgacgacggtgccgatgcctgtgggggtggcggcggacggaggagagctgtcatcggcatgagagagaggccggcggcagcggtggtgcgtctttttttaatttatttgctgaaatgttctttataggcggatgaatctaccgcatgcgaagataccgcctacctgcgaaaatcatatatttttcacagatgtttacttgcaggcagaatgcccgtccgcctgaaaagacggatttagcccgtctgtaaatatcttttttctagtagttactaaatatacaacagctgtacctaaatacattacactctgtttagatgagactaaaactttcaagtccctgacacattggatgtttggacactaattataaatattaaacgtagactattaataaaacccatccataatcttggtctaattcgcgagacgaatctattgagcctaattaatccataattagcctatgtgatgctacagtaaatattctctaattatggattaattaggcttaaaaaatttgtctcgcaaattagctttgtaattagttttgtaagtagtctatatttaatactctaaattagtgtctaaatataaagactaaagttaagtccttagatccaaacaacaccttaatcctatactcgttatatacttaggttgaaagtattgcaattttctttaaatagctaggtccacggtgtggccgacagacccaccggccgggtgcggcctgaacatgcatgcactgatctattgtgtgactttatatggcagatccatctcataatgtaacggcagcaacaatgtataacaaaagtaatatatatatatatatatattacttttgttatacattgttgctgccgttacattatgagatggatctgccatataaatatatgaattttaactattataacattcacaatgtatatagcaaatagtattaggaggagagagaaagtatagataaataacatattttattctatatggaatatccatatgcttatgaatagttttgttatttatttgatatagctagttttacaaagttactaggtggctaaataaaatattgtattgcttatgtaccagtactcctctgtgtcagtgaatcagtgtggatgaccattgcagggcctcgatcgtggctcactagtctcattgctgacttagctcggctcgtttagattatgggttgttaggtataacgctcgagctgcatcatatataagcatcataagccaaacgagccaagtaagctaagggctagcaaggaaaagaaaaatccatctctaattgtagtgtttgtgttatccaaattaaatttgaaaatacattgtttattcaatttttttaagaatatttgggatgtaatttttttgtgaaaatatatataccatcgatcttacacaaccgttgcaaaaaataacgcgtgatgtcgtgggtggtaccgcacgaccacggtgcgagaccgcgcgatttcacggaatggaaaagagaccgaacggtctcgctgaaccaatcagcgacatcgtctaacgactccatttgatcagtgattaattaactattaactactactcccttcatttacttttgatagtcatattttatcttgacacacagacgaaggataaataattttacttatcatccatttaaatatgctactagtcattcatcgtaaataagcgattcattaatatttacatttctcaatgcctatgtagccaatcatgtgtggaagaaatagagagtcatacattaaatccgagaaagtaattaagatgataggttgttggattgaaatatgcctatcaaaaataaatttttcagatttcaaaatatgactatcaaaaataaatgaagggagtaataattagtgatcaattattctgattatgattaattaataattttcacaaatcagaatattaatcactaattgaatccgtgttagtccggtatcgctgtttcaatcaatgagaccattcggtctcgctcttccgttccaattaacgccaaaatttggcaagccctaaggagaattatcgcatcaccaatagtcggattactgctatattcggttaaggaaattaatctatcaaaggaagcttatccagaagtgaccgagttcaagcaggacgcggcatggcaagttatctattaattaggaatagtttgttagtttcattttatctttaaaaaaatgtgtctagggtcctataaggaatttatgtttttcttttatctttagaaaagtttctttcttgtcctacaatgactagtatcacccatgagtataaatatgtatacccggggtcattgtaatgaatctctagatcaatacaactactctcggtgcatcgccaccctctttaccgaggtttttacttatcatacagtggaacttggcacctgacacagggctgcatctgtttagttcgattttcggcgaagaggtaagtcctacgtttcgccggccctggtgaatctatcggctacgttggcgttgttcaaggctacatctgtatattcgacctcttggattgctctggttcggttgatatttttgcctaccaatttatcatgtctctgttaatctagtcttagcatatcgatttagctctatccgctgcttctcgctttagggtttctgccagtatcggctaaatcgtcttgctagattagattatcttggacatctaccaccctaaaaatcagtcaatggcttgattgtatagatattatgtttcttttcatacttagtgctgcatcagttaagtttgatatactaagccgtgcttagagccatgatccctagcctgcttcttgattacctagtgctgcatcagttaagtttgatctactaagccgtgcttagagtcatgatccctagcctgcttctttgattgcaaataagggtttcattggggtttcagccgataaggtatctggatgttgtatcagcttacaaggattacatatagattagatttagccgatgacaataaagattttattatttatctaatattgtggattttatgacatcggatcttcatcttcagccgatgaatactttaaccttcaaattagtgcttattctattatatcatactactagcggatcggtttataccggattatattattattatactatattatcatcagctgattgcctttatatcattatttactcaagtatcagaatctacattggacatatagccaatggctcaaaatcctatcccaattgactggtatcggcattggctggaattaccccatagggttgtcagccgatcggctcattgatcatcaatttgtatatcttgtcaattgcagggtcaaactaactggcacgctcgtatctcaccaagatttagacctacactggagctaaacagatctcccaggccaatgtgtgtttttcgtgtcaacagttccgcgagaccgcgcacttttaccgcgcgatactgtccgtgacgtcacgtccacatcattttcgtgcaacggttgtacgagatcgacggcatattttcgtaaaaaaatttacatcccgaatatttaaaaagaaataaatgaacagtatattttcaaatttaattacgtgttatcctcacttaatacatgtgactgtctcgagtcttaatttgactcaactcatttcctccgtctactcgtcggcctgtttagtctccaactttttttttcaaactttcaatttttttatcacatcaaaattttcctacacacacaaacttctaacttttccgtcacatcattttaatttcaatcaaactttcaattttatcgtgaactaaacgcacccatcatctcatgccatcactggaaacaccggccacagaggccatatatagcagcagcgggatcgtgggctcacggtgccaccctagtggccatcgtcggccaacgaatggaagcatctccacacgcggatagacggtttatacatactacatgcgggtcaattaaacgtcgtatgattccataagtgctacagtaacttacatgtgctaataacagattaattaggcttaataaattcgtctcacggtttcaaacgagaaaattagttttttcattcgtgtccaaaaacacctttcaaaatccggtcaaacattcgatgtgataaaaaaaaaaattttcgcgaactaaccacaccccacggctgcccctcgtcgcggccgcgaaacctccaccaccggcctcgtccattcgtcttcaggcaagcaaactaacagcagctgccctgctctcttcccttcaagcagcaaaccaccaagaagcagccgtcgtcgcgccttgccggccggccgccgtcgctcgctgcagcaagggagggaggagagagagagaggatgggatttaggaagagagttctggctgtgtttgcaacctccctctcgctcgttttccgccacacgcttttcaaactactaaacagtgtgttttttgaaaaaaatttctatataaaagttagtttaaaaaaaatcaaattaattcattttttaaaaaaaaaagctaatacttaattaatcatgtgtgaaaaagctgctccattttgcgtgcaggagggatgagttcccatcttgcacttgcaaacacaccgatagagattgagaggaaagatagggagagtcttactggtggggctcacgctattttttttaaaaaaattgctgactggactgccacgtaggattgaaaccaccccggattgagccagggggttatttgtccggcttatatagttaagggtgcaaaatatccggtattcgagtttagagggggtaattcgatcgtccataatagtttagggggtaattcgtactttttccccgtgaaaatcattttcgtagtactggtggtgacatttttatgtaatctttctcgtagtattactctatccgtttaaaaaaccaataaaaaattagatgagatataatctagctagtaaaacgaatctgtactatctaaattttttttatcaatgttacgtctcatccaattttaagttgatatttattattgaacaggttgaatttttttttattgggcgagtatttcttttttttttctttcggctggtcagtccatcaaagctttaaattacgttgttttggtctattctgattcattgtaatacgttatatttcattctattttagattttttttagtcaagggaatactttttttactttcggctggtcagtccatccgaactccaaagtatggttgtgtttagattcaaaatttggatccaaagttcagtctttttccatcacatcaacctgtcatacacacacaacttttcaatcacatcatccccaatttcaaccaaaatccaaactttgcgctgaactaaacacagcctatacgttgttctcgagcgcacaagtccacaacggctagggatgtgaatgggccaacccgtaaatcccgtggatttctctactaatttaatctataaatagatttataggttaatccacttacatatctgtctctatgacgcaacagaccgagtcatgaagtaaaaattcgaggattatcttttatttaaggtataagtaggctggtgggtccgtgggtcgccgtcgaatccacgtgcgttgtgttatcggaattggtcagttttcgtacggctgtgtttagttcagcgcaaagtttggattttggttaaaattagagatgatgtgactgaaaagttgtgtgtataacaggttgatgtgatggaaaaggactgaagtttggatccaaactttagatctaaacacagtcgtagttccacccgtactgaaatcatgccaaattctacgcgctcagcactacagccaatgcagacagtttccgtttactccttttttattttgcgggggaagtcccgtgtacttaaacgcttacagaattcgaaggttgaaacggctaccttagacattgtttagtgatgtaaaaattataggcgtgtcacatcggatatataggcacatatttaaagtattaaacatagaataataacaaaacaaattacagattccgcatgtaaactgcgagataaatttattaaacctaattaattcatcattaacaaatatttacggtagcaccacgccaccacattgtcaaatcatggagcaattagacttaaaagattcgtctcgcaatttacacgcaacgtgtgtaattagtttttttggttatatttaatattctatgcatatgtccaaacattcgatgtgacagggtaaaattttttgcgtagggactaaacagggccttagtaccagtactattcatacacaaattaatggagttgattacttgagctaaaggtaacttaaaattcaagcctttatatcaaacggtttagtatttgatattcgtggaaatatatatacactatattttctctctcaaattcacatcagcaaaataggtgttaagtgcttaagtgctatgaaacgtctgatcaattcttaagcttgagtgctcgacaggtttacgactttaaaacagacctaccaaaatattatttttactaaaatattggtagtgctaaaattatagtgttttctctacctctcacgaactaaaatttaaaaattcaacacctttaatagactataggtgcaggttcaatagtaaaaccgacaactataatataatataatagtaacgatttttgaatactgtgtgctagctgttccgagcttcaaacatgattataataggtgcatgtgggtagcaaagatttttttttctttttgtgagatgcagaaagttgtcgatctgatattgttcgagaccatctggctatcaaagcatcattcatagcgttaaagtggacctaacccactactataagaatcgaactaacgtgtcaaacaagaaaaaaaaatccaaccaaaagcctgaagctatccgaatgcaattcccacttagactgtgtttagattcagggataaaaatttttgctatataaacatagtataataataaaaacaaattacagaatccgcctgtatagtgcaagacaaatttattaaacctaattaatctatcattagcaaatgtttagtgtagcaccatattgtcaaattatggagcaattaaatttaaaagattcgtctcgcaatttacacgcaatctatgtaattattattattttgtctatatttaatattttatgtatgtgtccaaatattcaatgtgatatgaagaagaaacttgctaggatctaaataggtccttaatttaagttagacgggtcccacatcaaatcaaatcaaacactgtaagtgctggaccaaaaccaaaattaactctcttgggtcccaccacacatagcactcctttttagcaattttttatatatataaataacgttgttgatcttttacgtttcgtttcacccttcgtcctatataaaaatactataaattattatttattttgttgtgatatattttattaattaataaattttaagtacgacttatattttatcacagttgcaccagttttttaaattagatgaattgtcaaagcattatttcaaaagtaaagagcatcatttattgaaagacgtggaagaacttaaccccaagttgcacgcgtggattagttcagaatctcttcaattcgtctttccctttcacacataataataattgcttcctaaacttgacatgaatagttttttacttttatatttttcatatactataatattatatagaaacacaatataatcatagaaaagcacattcaaatgtgacaatgtgagacaggggagcataccttcaggatgcaaggctgcggatgtgaagtgaagactgaagaagcatccgtgctgcagtaaatggcgcctatgtgggcggattacgtgagcaatccgagctttaattttctccggggaagataaccttggaaggactaaccactccttttggacagattatatcggcaaagaaagaaaatttcttgtaacctgaaaatttcggatgcaattgtggttctaggcatgtcgaagagcagcagcaggcctggccagttgctttatcgtcttccaggctagtaatcattattctcagtcagtgcagcagcatctgcggctgttagaagcccagatcaggaggacacatatactgtaagtatttagtttgttggttcaattgattcacagtcgcgttcagagaagccgacccgaggagggattcacttcccatgagcagaaacaagaagaggagaagagaggaggcggggagctatgccggatcggatcgccgaaggagatgagattgaacagaagatcgctcgatcgctcgacgatcgccacagcagaaggaagatgctctacagccggaacccacgatcgactgacacctcgccgccggcgccggcgtcgggtgtgcttcgaggaaactctcgaaacctctttttgacgtaatcgaggaaactcccttgatttagatgcgtcgtacgcggcgtttactcccatcttttataggagtagccccaaatttgttgtactacttggaaagttggaaacccgtcaacgcgcaggcaggagaggaagcttcgcggaaggtgcggggacacgcgggacagctggagtgataggaaatcactcggccgcgccggtcgcagggcacagccacaggcggccgtcgatgccctccccaccgcatgagccacgcgagtacgtgacgtagcaggcagccgttttctgccaaaacaaaccatcaacagtgtcaagagggggatgggaaatcgagagtgatgaataaaggtggtattcttctctccggaagataattttatgcaaaacgagatgacgttaacatatgattaattaagatttaattattacacacttaaaaaatatattaatatgatattttaaaacaactttcatatagaaatttttttttttcacgaaacgcaccgtttagcagttttaaaagcgtatcatgaaaatctttatcttcattcaacccttgttggagaaatgaacgggaccaaagtcaagccgtcccccgtttgcccatccaaattccaacaaaccaaataaaatagattaaatttcagaaaactgcaactttagtgataaaactatcagtttgctgcaacattggcgatatgtttcagtttgctgcaacaatagcgtgggaaattatcacaaaactgtagcaaactaaaacatgccgctaatgttgcaacaaattgatatttttgtcaccaaagttgcagtttcctgaaatttactcaataaaataaaatctaaggaataggtatattgtgtcttcctcatttatttctcctgattcaatcgcctcgctgtcgatttttaggatcgtcaatataagttataagatgcgtaagattaaagcgagatggtgttggttcaggccctcgagagaggtaataccctagtttagttgtttgtttattggatctatgttgggtgcacgaccaacaatgaagtagctgatcgcacgtatgaatgaaagagtgtccaaccctctagggtttatgccggcgccctttatatactgctagggtagccaacggcatgcatggtacgatatcccttataatctgggtacctaccatctatttgtataggatatgatagactttcttatctctaatcccgttctatacattgaagataaccgcacgggcgtgggccactcggcccactctatgtgacacagcccaaaggcctcctgtagggcacctggataccgtgcatccaacactctctcaatcctaaaaccggatataacgtctcccctatcttcaaaaactgctgcagatcgactactttagaggtttgggaaacggtttctactgatgtgacaggttgattgtggttgtcttgctaagttagcatgaaagatctacatgtcaacaagtcctcaccctctctaaccctctctctctccccctctcccattccctcttcctcctttcctacctttcagcagcattagaggccaggagggcggtggcgagccggagacaagaaagctggtccaccagggcagccggggaagcccgacgggaggaggtagtcgtcgcgctcgcaaagtcaatcagggacgacaagtggaggtggcggcggctagctgacgcacaaaacaaccaatgacgccgcttgtggccttcacaaacagaaacaacacgtctttggcagaccaagaccgtgtttagttccaaagtttttcttcaaatttccaactttttcatcacattaaaactttcctacacacacaaactttcaacttttccatcaaatcgttccaatttcaaccaaacttccaatttttgtgtgaactaaacacagcccaagcctgtcgtcatgaaggtgattgcgcatccaccgtccacgttgtcagggcaccttccactgaagccgatgacgtcttgcatctagatatggtgcctgttggtatttcttaggatcacagataaatccgtaagcgcacagatactgctgtagcatttcacctatgagtattttcaaaggtatcgtattatattccatcgggaaggcgatagtatgaagatatgcttatatctctttaatcaatctataattaatttaccatagtctagataggggttaggataatgattgaaaaggtagtggactctaaaagaatgtccagtaggaaatggcacaaggaaactaagatacaattgtacttctatactaatcatacctaatatacacttaacatatatatgcttacaacatagaatttagtttcaagcacccaggtactatcgagagaccactccctgctgatctattagtgtggttatggtatttacgcacttttacgtcatatccgaacgtggaggaatacggaggacggacatggctgtcatcacctactgcctacctcacttttgtgggaccgcatccaacgatatttatctagcctaaacaccacgtttaagctagtaaacaatatcactaactcccctaggactctcacccatcgaatgaagagcaacctataaaggtcattggatcgttaccgtagcatggatcaactagcctaggataaagcagataaatgaagtatctactactcgtagagaatatactcaataaagaattatataaactataagcataaataaagaaagaagatgattctattaattcaactatagtcttacacaaagaaaagagtactagagacatattgttaacaacgaaatttggcatcagattcgaagaagatggaagatcgaagcggatttggtgttgaatctaactgaacttggagtcagactgcgcatcggttagatactgtatcggctgaaaacagagtatgaagttgatcaaggttgatgaagccgatggccgatacagccgatatgacatgacttgggctcggtatgggtctagattgggataaccgtcattgccaaatagagaaggagctcgattaagacaatgtatcttctccctccatcccaaattatagggcacccactttttaagaaaaatcaaactcgataacttttgactaataatcatactaactatatatctgctaagtattatgaatgttgtatcactagattcgtattttaaagtacttttatgtgatgctaatttcatatttgtatgaaacataatatggaataaattaatggtcaaagtatgacattgaagaccgtgtagaaaaaatataggctttataatttgggatggagggagtattaattaggatattgagtcggtttattagagatttgttaagagaccgtcgtgtatggtcttgtttgtatcttaactttagaaaggtttaagtcatgtccataatggactaagtttgtactcgaggtataaatatgaaccccatagagttgtaatacgagagccaatccaacacaacttcgacgcatcatcacccttttacttttcgcgatttccggcgagttcttcgcaagaggtaacccgtctcgatggccctcactatcgaggctaacatgtcgctttaggcgcgttaggctcgatatcgcgagtcattgctatcatatgtattagttaatctattcttagcttctcaattcaacactatcgcctgctactcgctttagggtttatgtgtttgggttaaattgtcttgctagattagattagctaaggcatctaccatcttgaaaagtgtctaattgcttgattgtctaaactgcatgtttctttacatactttgagatgcgtcatccctagtcctgcttagaaccatgcaaactagcatgtaattaggcataataaggatagcatcgggatttcaactgatcttatctaatatacatgttttactccatgtttcatgtatattcgccacttatatagatagatcgtttatataagcatatcaagctttagttagtatcagctaaactcttgtaccttcatgcctgattttctgtttgatatgtttatatggatcaatctgcttatacaggtttgtactagagtattagctagtatgttatctttcttgctctaaataatattgtcttaaaccaatctattaaactccatagacagtattacggccgattgggtgtgtttagggtttattattctttgatatatccagtccatagacgatttggtctaactccatcggctaagaccatcaacgatacgctatcggcctattggtcgactaattctgcttttattctttcttgccgattgcaggatcaaatcagctagcacgcccttgacatactcgaggctagccttggacctgcactggagttaagcagatctcccaggccgccgtgttttcacatcgatacatacgcagagctccgaggagactataggactaaagctcctaagttttattcctactagaaattatagagaatacaaagtggaagatagaattgctcctctatttatagtcttagtaatgacggttgtatggcggttaggagccactaacgtgcataaccgtcattgggaagcgctgaggagtcgccacgtggaaggggagagccgagcgtgccaacttgggttcggccgaacccatccaaccgccattatccgctgattttggcaagtggatgacaggtgggcccctatgacggttccctggtgtttggtcctatttgagtcggtttcagctgacttgtgggcccctcaatccgtgtgctcgcacgtgattcgtcggatgtgtgattctttgcataccggctttatttctccttcacttagtatataattcgtgcatccacattagtttccctttcctaatacaactatattatttattattggtatgcgtgtaagaaatgcaaatttttcctttattaattctgttagttggcggtcaaaattggtacttaacgaccatcaacatgctcacccgcgatgtggagaggaggcacgccatcgtcaaagagagttgaggaagaagataagtgaggactcgctgggtcctacatgaaacatgactcaaccacagtcaacctgccatgtcagcagaaaactacttttgaaggcaccgaagaagacgatttgcactggtttttaaagatgggtagacgttataccccgttttggagttgagagatactattcaatcaaaagcaagagttaatggaggctaaataggctttccttgcatagttggatgcctattagatgtaggcatgttcatacatgggttcatttacgtctttcatcttgaagttgaaggatactaggatctggggcgcgcgcccttggcggcttggcgcaccacctgcatacagctggtgtaaaaggtgactgatgtttgcagtaggtgatgaaagcatatgctatgtttggataccttaacccatagtgttcactgttgtcattggatcatcctgttgaatctgtgttgcgttcagattgctttgttttttcctgctaatggcaaggttaatcaatatttttttgcaaatattctcagaaactctcaagggtggtatgcaagagatgtatagggcaagaaagcaacagtaatacttcctatgtttataaaaagcacggttgattgggcataggctcaatgaaaattgcggataagtacgataaggatgttgttaggcagtggtctatagtaatagctagacatagccacctgcattttttttctagttcattatatgcgaactttgtacacgtagcatttgaagtacagaagaatcttttgaggaaaatccattttggtgatctttcaaaaatcatacaaggcactcttgtaggcatacataaatttctctcaccatatagtagtctcaaactatgaagcataaatatggctttgtcatcttgaatacgatcaaccattcattgtggacaagaaatggttgacatcgacgaataaatattacccaaatcaataagttctacaaacatcttcctgtgaaagaaagcatgataggattatgtaaataagccaaatatatttcagagtgtgatgaagaggatatacctgataaatatatattttagagagtgcgatggagaaagatatagttgacggtgtatcctctgttagattaagataactcttgacataatatggcactactccatgttcaccatttctgtacaacaccaaattagtgtactatctaaagaccgtgtcaaaacattgacaatactaaactccaagagcctatcaaaacatcaggatgggcatactggaattgaattgaaccctagcataaaggcagtgataactttagatgcaaccaaaaaaaagagggggggggggggtagggaaactatgtattttttattataaaattcttatgtagagctgcaaaagcatacaacatataaaagagtagtgtgaaagtgcactttaaaatggtctgcttaatatgtttataaggcaacaaatgaaatgaccttgttcatcacatgatatttcaaatctacacaagaacattaacataagatatgcttgcttagctttttcttgtggttgataactctatttgaataaatattattaaaaaaatatgcatatccattcaattgtataacaaacatgtgagggtgaaatagtgagataggtaaacatctcacttcagagggtctgcaagcagctgttgcttattagtcacaaaactacaatcctgatttgtcataataattgagagtgtgtgagaatgaaaaacagaacaagaaaactgaattgagcagcacccttgttacctgctagtaaaaatgtgctccctaactccagatatagaggggcttctttcatataattatcctacaaaattaaagggcacacaagtatatatgagttcaagtggatgcagaagtgcttatcacagcctctttggagaaaatggcagtgtaaagtatgattctacatattgtttcatgtattgtgtaaacaaacacgtttacatgcttgttctgtgacaaggaaaaaattgtttgtcaaatcattcataagaatggaatttaagagtaaataaataaatatggcaagttattgactcggtgaaatcaatttctattagaacagaaacaataataactaatttcgcatttgaaatcagctaccaccaatttcctggaagatggataagagcatcccttccctgggaggtatacccaacagcaagcagcatgagtagactctgaactctgatctaatttgctcttaaaataaaaccccaatattcatacaaattttgagaggctagtacatgaattttaagtgaatagcttggttcctactcaagaaaatcagcaactttagcaattcatgataaagttcaataggagatttgagggattcagggtttcacttaaaatttcccagtgaagtgcatgtcgaccttcaagtttagtaattataaagcaagtaaactgaaatgataccaacttagagcaggggatacaaagaatgaaattgctatgccaaggtcttaaagtgccaaattttgacaccaacataaaattcacacaaattaaattaattgtttagtagagctgttcaaaagtgatattaatctatcagtagagaaaaatttgaatataaaccatagagagcaaagaaaaatcaagcattttagttttttacttcatagaatcttctggcacacaagtcaatggcatgccatctgatatactatcacatctcttggaccttgagcattttcaatgtgcagatggactgagggtctgtttggttgcctgcatcaggcttggcccgcacctatgcatacaaatttaccttgttggttgcttgcatggacctcccagccaggcccagcgcgtgcaaaaagcggtcgccagccaggctccggaggaacgcccgattcgggcaaacttcgctactcagccaggctgagcgcgtgctccgtgttgcacccgcgcgtgcaaactgctgcatccgatagctggggtcaccgctccacacccaggtcgtcgcccatttgcatccctcgtcttgctcgctctccttcttcctcgagtccaagcgattctggcagttctaaccccgatgatctcacagccacacgaagtgagggcatccagcagctttgccgccggtagatctgaccacctcaaaccgaacgacgagaagggatgtggggaaaaggctcggtggtgagagatcagctcgaaagggaggatgaactgaccagatctagaccaccaaaacttctttctcgcgagccgccaaacaactagatccggccacagttggtgttgagcggcaggggctaggggaagcgctggtcaacggaggagggccagcaacctccatggcggacgacggacggcgcacggcggagagacgaacagaagcgaagcgaaggagcaggagtcttttacccatatgccattaagaaagttggaggttacgcgtgtgccacaaaaaaaagttttgagtcacctgtatgccatgacacaaaatttcatttatccgtgtgccattccatccaccttctgttacagaatgagctatgacatgtgggacccacgtatgaaaatgactaaattgcccctgaagcattttcatctctactcctcccctcccgtgcgcctccactcgaaccctagcctagccgccgccgccgccggtcgtcgtcgtcgccggcgcgccgccgctgccgccgccgcctcgcctcgcctcgccggcatgccgccgccgccaccgccgcctcacctcgtctcgcgtcgcctcgccagatctagcggcgcgcccaggccggcgtgcccaggccggcgcggcaagccgcctcgcctcgcccccggtgcggcacgccgctgccggtcgtcgccgtcgccggcacgccgccgccgccagcgtggctgaaatagagcaagggcaaaatagacctttcaaacctctgttagtctccgttagtgctgattccatccaaagtggctcacaggtaaacgaaagtttgtgtcatggcatacagatgactcaaaacttttctgtggcacacacgtaacctccaactttcttaatgggtaaaagactcaaggagcaggagttggcgaaacgtatgggattcttttctccttgttttctttttatttttcctcttcttccgtggtttgtctaggtgtattaaaggctgattaaacaatgctggtaccgtgattgattcactgtgttttttcttttcttttttcgacctttcttcagccggtaattagtcagtaatatagaaagattcactgtatgcgacactagttgaatcgatgaattgttttaccaactagttaagtgtccgtgcgttgcaacggggataaaaatattttaaagctaacaaagttcaccggtttgctaaactacattttagtaaaaatacttatgatttcaaatttgaccatttgagcgaacaaatacatttgtctccttctattcataaattctgttaggtgaaaacaagatcttacatattgatagatgcaacgaagtgattataacatgaaactcaatttattggccacacgccaaatatattgtcgattctatgtatattcatgttgacttcctacaggatattttgacatgtaattcttattcagaactgctcactacactgattcatgtgagaaggtattttgacactattagtattattgttactaaggacaatttatgagaaaacaaagctcaaagtttataaactcatgcagcaaatcgatactaacccgctcagggcttaagcacttttattgttgcatcttacattcttactacgtatgcccaatggtatatagtggttaatacagcaagaataggttaattgcaatttggaattgttcattgagattgttgaacatacaaatcaacagtaatcctgatgctaatcttctttcaaacttcagaaactaactaccaaggcatgttaaagaaaaacttaagtctaggttgacccatttcgacaacaaaaccaattcctttatatttcaaataggcagtgccaacacttcacatatagctgaacaagcagatttagcaatgggtttttatgtcctttcctcctatccaacccattggcatcaagccagaatctctcctgagtagtgttgaggaactgtatattttccatcaagttggatttgaagtgtatctcagatgtccatccaaatcaagacccttgcaacatcctcttttgccttcaattcaacaataattctatgatgacacagcagcttccaaagcagctcctttttagctgctctccccctctcaagatatgccagggaacactcgagagctgaaacaacaagtattctctcaaactaaagaagttatgtaattgctggccaagttttttcactggctaaatctaagtgtgcttcagctagttatgctagcacattggtaagttacccctaaaacaacacatctcatattagaaaatggcctatttattcttgacaagtatattggtcatttggcgtagataacatataaatttgaattaggaagcaaccatggcacaaagtccagagagtttatatagcagatatagcacaattattggatttgaaatagtagcaaatagaaaagttgtttggtaggtgacagttttttagagtacaagcagcaatatataacaaatagacatgaacagagagcgaatataatataatttcggcctttttagcatagaaatatacatgactaattattgtttgattgtactaacctaattgtccatgtccaggacaataactccatatgtacctagagttaacagactggtaatcaacacattatgtttctataacagtggatcacagttgatctctacatgaaaaatcatgcaagtaaataatgttctgaaaacataccttcaaatcctttatcaatattctccaaaaaaaaaaaggtctaactacagtcacaagcagcaacggttctttgaatttcagtgaggcaaggaatccaatatccaataagtaagattgccattccattgtagcattataaaggaaacagtacccaatgagagtttttcagattcagagatataatcaagaaaacaggttgctttctcaaaattaagacaatgtgtattgtccaatgaaataagcctaggcaatttgctttctcaccttggcagatcgatatccgcctaaaacacataaaagatctgtaatacgcaagaagtaatgattgttaagaataattagaaatctcaaatctcaccaaactaataattaggaaagaataatcatccctaacaatccacattgagctatgttgccaacatggttgaagagcaccgattttattttattttattttggaatgaaggtcagactttgttaaaaaaaaatgaaggtcagacgtcccaggttttgattaaaagcttccaaaattttaagttctacaaagaagacgacattttgttgatcacatttgcaggtatttctggacatcatatgctctattttctaatttgttaggaaaaaaaggtttcatctttagacctctggcagtatgataactttgatatggacttgtatttgctttggcactgaactgagtatttctttgtttcccaaacagatatatgtgttacctaaaagaattaattgcttagttcactcctttagctcatgtttgacttgttcatgcagaaatagctcatagtttccatacatgtcaggaccatctatttctgcctgaacaagtaaaacgtgagctaaatgaccgatttaaacaattaacatgtccacttccattggtaaataagaaaggagattgggctcacttcattctaggatctcctttgctgtaacggagagtagacgggtgcctttggattctcaaaggatactttgtttgagacaacaatcagttttggatgctaaaagtgtgaaaaattgtcaggaaaagccactttcaaaaattgtgaaaaatgtgagataatatactgaaatcctacagcagaaatacctcctaaaaagagtgcaaatatgaactattctctcttgttcagtaattgcagcatcaaggagcccttgccccttgccacttcttttataggcatcatttgaaacttgcaacctggaactgcatataactttccaaaactcaatacatggtgcatcatccatagattgacatggaaattaaaggagagcaccaaccttcacaggtgttgtacacagacagggtgggaggtctccataatattcaggctggcatatttcagagctagaaatgttcaggtactaccatctacttgttccatacgtagtcctagctagtatgcaattataggtgagatgtatcatgtatgtaaattagcacaagcttgcagctgaccaaaatcctaaagctaatcgtcatcgagggtttcagatggaagaactcaaccaccacccaatcagtactggaccctgaaacataaatagccacaacaaaaaggtaattcataaaatttcactgatcttaatcttacagaaggtgatcgagactacgatatataatcatgccttggagatagctaataattaagcagctttcatggtatgacgtatgtaaacaaatgagcaaattaaccttcaagccaagaaacattagtgaacaccaacgctagctgaatcaacaacagcaaccctctcgatggcaatcctcaacagcacatgctcactgtcgtcgcagctgacgacgacgatgtatgcaagaaccacccaccggacggccgccatgatcaagaacctcattaatttgctacaattcaccctgcaaaaccaaaagctaccaaagaagaaaaagttgtggagttgcggtgcgattgcgaaaaggtggagttgacggcgaggacacctggggcggagaggacatctgggcggcagatcgtggcacagcaaactggaggtggcggcggttcggttcctacctctttcgactggattggaggagagaccttcgtggatcagataaattagggctgagggggagagataaaggtgctgactgctgaggggtagggaggcgtgaagctcagcggacggaatggggcgcgtgcggcagatgaagcgtggaggatggatgcggctgcgcggtgcgagcgggcattggagaggcgagcaatggggagaagaggaaggagagcgtgtaggaggcggtgcgcgggcggagaagggcggcgtgcgatggagcttgagcgagggtagcgaggtgatggatgcgcgatgcgtgcggtgcggggatccggcgcgatgcgactccggatcggtggtggcgcggtcgtgggtgtttcggcggcgcgcgcggtgttgtcggaggagaccggcgaggcggggaccaagcgactccgtattggtggcgaaccggagattggaggcgcggcggtgttgccggcggtggaggcgcggcgaagaggagggaggtgcggcgaagaggaggactgcgcggcgatgggggcgccggctgtggaggcgcggcggaggaagaggtgggaggcgtcggcggaaggaaagcaagcgcgagcggttcggggaaggaaagtgaatcgcggggggagaaaagccagaaaagcggatcgcgaagttatatctcagggccgtccgatctcccgatccaacggttatagaacacgtgtctttcagagttggagtcaccgccaccactatagaattttaaagtaataatagggatagaaagattgatatagaaaaagaaaagttcagttgactaaactctgaagtagtagaattattccatgtcttctaagcggtaatctcaccataaagaaaaagatatcatcatacctatgattcataccaccaaccaaacaaaatctcttccgaaccgtatctctcatgcaatcaaccaaacagtatctcattctagccaggttagattgatgcagacaacaaaacagctgcacgtgtatcctcttagccaggaccaactcagcctggatgagagagatgggctaggctaggtagatacaagcaaccaaacagaccctaaatgtgttcaatgtccagaactattgcatgcgtttaataattctaacattggtaaattaaaaataaaccaaaatattattgggagggtaaaagaactattcattataatcacatactctttctgtagattaatttctctttttccatttagtaaactcctattgaaatactgagtacacaattctcaaaatgaaatctagaaatttagtatacaataaacttatgtttgaaaaccttcacaaattagtaaatgccccaaaattttgccatgaaaacaacttacactggccaatggttgtctttgatttattggttgacattgatgtaccccttcaggaccccattctcctccatcgtctatgacaacagctccaggttaccaactaataatataggaaatattatagatcagcctagtctttcaagttgacaatagatagaaaagtatgtgtttatgtggcatcaaaattgtcagcggtgaaaagtaaacaattacaggataaggtaaagataattacctatcttagggcctcatcttttcgcttatgcttatacttatcagccaaattttaaattttcaactaaattttgtagttgatttttaggtttttttcatcaaagtttatttttcagcctttgtttttagatcgctaagaacacgtatataaaagttttattcacaaattacttttcgtttgcaaatatgccgtttggcttattccatgaataaacgaaacgatgggatccttagaactggaaattggtagctcctactgagtttaaaactgacagatattatagaaatcagataggctttttatctgatgttctagagatcattagtttcctggttctcccaatgccttcctacaggaggaaaaaaaaattcatgcaactctagatagtaataaaaacaaaatgaaggtacatgatgattatgcataccagattccttgttcttctgtagatgtccagagctttgataaccacaagttttgtcatgtgaaagaactaatacaacagttcaaaaatagaacttgatcagggtaaaatccaatggatctatctacgattcaacagaagaagaaaccggtaaatgatagaaataccatttccacatgggaccggccaccgacagctttggcagcgggagcgtaggccgctgcttgatgagggcaaagacgatgaagtcctcccggagcagagcgtcacgctccaccgccaagctttgctcctgatccatcaccaactatctctctctgaatgtgggctttgctacaactgcaagggagggacgtacggggagtcacaagaacaggattagaacaacacgaacatagaaagatatgtaaaaagtgagaaaaaaaaagaggggtgattgagatttcagactaattatgtgcctcttggttcatgctgatgataaaatcctgaagccgtcgccggcagaacgctagattattcaccctcatctcctgcgctccctccctagcaagataacaacaattaacacctacagtagcacttactgaaaagagaactacacaatgtcacaacaacatctcctcgctctcgtctcatcctctccctcctccgtcgctgctggtccacccttcgcccttcgccacctctgccgcagagaggtgccctatctccccttgtgagagagaaagattgatatatggaggaagagaaatttcagtatttaccatcaaattcgatgatctttaagaaatagccacccaatacgctagcctttcaaaatctaccactagggacgcggtattcttcattctgtgccactccgtccgcccgtccgcgtcgtccgtccacgcgaccgtctccgaactaggtggccgtcgtcgcccaggatcggccgtcgtcaccccgcgtcccgccgtcaccgtcgtccccatccccaagctcgttcggcatccgatcgccgttgtcgtcgcccccgagctcgcgtccggtcgtcgtcgcgtcgccccttagttcatgttccgccgccgaaccaccatgcccgccaactagccacgcgcataagctgtcccagtcggaggtgctcgtgtcactgccgtcctccctgccaccctccgcggccgacggcgagtcggcaacagaaccaagcgctgctccgtcccctgtcgaaggtgcaccgtccatgaccgcccacgtcggcgggagtgagctcgaggatgaaggtcaagtctggggacaacggccgacgagttcggagacgacgaaggtggtgaccaagctcgaagacggcttcacgctgacggacgacgcagacgggcggacggagtggcgcataatgaagaatttcgcatccccggtggtagattttgaaaggctaacgtattgggtggctattccttaaaggtcatcatattggatggtaaatactgaaatttctcgtggaggaataggagtgaaaggagaggaagggcacctctctatatttgcctgaaccgagcatatggcacagccaaccgccactcgccatggtcattgaggtagggaagacggtggaggcgatgttagggaaggagctaacggcggccgccgatcatgttgccgctgagttcgtcggcagatcagcgccactgttgccgttgatgtcgccgtccgcttcgagctgccatggagctcgtcgaccagagctgtgaccgccaaaatccacgtcgccatcgatcagatccgcactcaccggctaggggtgtggtgtggggaaggaggggcggtggtcgccgtcagcgtcggaagcggtgggctcgatgcctcgatgcggtcgacgatgctgagaaggattacaaatacacttattctatagagaagcacgatgaaccatcgctatcgtacctgcgggccaaccgtggatggactatcgtacctttgggccggtccggcacgatccaaatcgtattaggccatgtctgggccgtatgtgcagcccgtgggctggcacggcacggcccggtgtgtaagtttggccgtgccggcctgactaacctcggagcagacacggcggggcctgggccatgctgtgctggttggtggagcacagcaagattctccatctgcgtgcgaccgttacaaggcaaatccgcgcaaaccatggatttgcagtcgcgttcagagaaggtgatagattcccggtgagaagaagcacaaaggaaacaggagaaagggtacgggtgtacgacagagtgccgcggacccctgatcgatactgatacctcactggcgtcaccgccgacggtaaagggatgcttcgaggaaactgcgcgccttgatttttgatgccagtcgtaagcgtcgtttaattgcgctttatagactccctactagcggctccattatttcgcttatttttgtgtaataaaccaaacaacatatttacaaacgaaaaataatttatcaataaaacttttatatgcgtgtcttagtaatttaaaaacaaagggctagaaaataaactttgatggaaaaaaatcttaaaatcaattttaaatttaagatgtacaatttaaattttagccgataaacgtaacgataagaaaaaaaggcgagccctaaatcctaatcctaaaacttctcctttcgttcaggtacatcgtcaacccacgcgcagcagcgcaggaagcttcacagaaagaagcaatggtcaaatgttcggtcaaatggtacaggccgtgtttagattcaaattttattcttagaatttttaacttttccatcacatcaaatgtttagatacatacatagagattaaatgtagacaaaaaaaccaattacatagtttatatgtaaatcacgaaacgaatattttgagcctaattacatcatgatttgacaatatgatgttacagtaaacatttgttaatgatgcattaattaggcttaataaatttgtctcgcagtttacagacataatctataatatattttgttattagtctacattcaatactttaaatgtgtgttcgtatatttaaaaaaatttggcacacgaactaaacacagccacagtatgcccgtcaacctgttcggtcaaatggcacagtcttctgtgcaatttacttgtgggcttgcaggcttgcagccacaactggtaatggcattgtctatgtgggtcaaaagttctggcgcgttgatgatattggtgggccttagcaagcaaaggcgataggaaaaagtacaccgaaggtccctcaactagtcatcgagttacacaatcgtcccccaaccgcaaaaccagatatctagcgtccctcaactatcaaaaccggccacaataggtcattcggtggttttgacttcggttttatcttacgtggcggctgagtcagtgtgggacccacgtgggccccacatgtcaggctgccacatcagcctcctctcttcctctcttttcccctcttctctcccttcctcatctctctctctctctcccttctctgactcagccagcgggaggaggagggcgtcagcggccagcgaggggcgacgcggcggcggggggaggagcggctcgcgggctcccccgtcggcccccgcccacgaggctcatgtcgtagaagcccttcccgtcggcaccgcccagcgtgaacgcggcgagggtgatgggcggcgcgccgccgagggagcaactcacggcgccgccgaagtccccgtggcacaggcgagggacgcggtgccggagggtgcacagtccgtgcgcgcccacaagcggccggaccaaccatccggggctgggaacgagacgttggcgccgggcgacagctcgaagccgcccccccccgacgaccaccgcggtgtttccggacaaggtggtcggccagacggtgtaggtgcagttgttgtgcagcgtgaagaccgtcgtgccggctgcctcagcgccgaactgcagctgcgaccatgggaaccctgcattgagacacaccattgttgaagatgtgctaacagcctaaagttaaccggcctgaaagtttctcggacttaccaacaaggagtagaagggctggagatcgtccgaattccattgatcaaaatggtttagctcgaatgagaaaaaggtgaatatatttttttggaattgaggagagaaatggcagttgaacaatgcacgtactcaaagcgtgcgagctgcagctaagataatagaagaggaaatgcacaaatggtgtagtagcagcagcagtaatttgcctggtgattatcttgtttatatggacgttggtgatatcctcagtaatttgccgtgtcgtcgccgcctcctcctctgccgcgtgggcctcgcgggcggcggccggcgggggagcccgcgcgctgctcctcaccgcccgcgcgccgcccctccccgccgcccacccgtagcttctcccccaccgccgccgcgtcgcccatcgccgccatcaccgctgccgcgtcgcccctcgccggccgccgacgcgttgcccctcgccgacgccctcctcctcccgccggctgagtcagagaagggagagagagagataaagaagggagataagaggggaaaagagattggaggagggtgatgtggcagcaggacatgtggggcccacgtgggtcccacgctgactcagccgccacataagacaaaaccgagatcaaaaccacctaaagatctattgtgaccggttttgatagttgaggaacgctggatacatagtttgacggttgggggatgattttgtaactcgatgacaagttgagggaccttcggtgcactttttccaaggcgataataacatgcaatgaatggaattgttgtcatactccatcataacaactttgcgccctcaatttagtgtagttaaatccaaattgtatacgggagcatggtgtctaatggtgggacagaaagacagcagctgcacggtgaatgcatttacgtcttagattttttttcacttcatccagagtaaaattttgattttcaatactcatggttaaatctggtaataaaagttttactcaggttaaatctcaaatgtctattctttttaattttacgatagcttttaggcctttaaacctgcggcgttaattgcgatgttagtcatcaattataagggcaggtacaacgcactgtcccttgccgtagacatgcagaaaaaaattgcaaacacccccccgcgaccatcgttcgatgcaaagccggcgtctggttcagctacggctgtggctcgtggtcctaggcgcggggacatgcgacgtgaggtgaagaagtcttttttcgttggaaaattaattaccctgtagacagcagctgtccacactgttgtacaaaatgtcttttcagctgtctgtttgtgccaaaaagacagcagctgtctgcattgctgtacttgccctaagtgtccttgaataagggagtacaaaacttcgtgaaagatggaaaaaattaaccacatggacgtaaattgttgataggtcttaatgcaaagtttgacgtggactcgatcaagaagtgaaagcacaagtggtgagactgacacgtgggccccatcattttttaaatttgtatttgaaactgacatgtggccccacggagtttattattttttcgagtcgaattgccacgttagacaaagaccgagtcaaattcgtcacgtatgcgctacgtcagctaaaaccaccatctaaaccgccgagggaccttatctgcaccggttttgatagttggagacccgttatatctggttttgaggttaaaggacgaaaatcggattcgttgataagttaagggacctcatatgaacttattccttttattctccactcaatcacagttaggcccatccccccatggccttcgctttgcgttgttttcttagtgctagctctgcactgtacgctgtctgtcctcttgagcaatatctcattttcttctttttcttgaaagacccaactttcttggcttctgtattaagggctggttgggtttgaggcctaaatcaagcttaccaatatttggcaatttcaatagtgtttagtgtctacttggtttgaagccaaattttggtatgcctaagaaaataggccatttcaatagtgaacttaggttattttagcttcaatccaaacacaactttgccttaccaaaattagtcatgacaaaacttgccaaaatttggcattggcaaaatttggtaaggcctatttaggccacgaaccaaaccaaacctaactagggggagaattatacgtacaaacttcctaagaagcataggaaacagaggtccccatcgtttggcttattttctaataagccaaaacggcttattagaaaataaaaatgaatttataggtaaaacttttataaatgtgttcttagtgacttaaaaaccaatgttgaaaaagaaactacgttgaaaatatctcaaaatcaatctcaaaattaagtttaaaaattcaaaatttggctttttctttggctgattaggccatccgatgagagccagaaacagaggtaggagaatgctctctgaaacctctcgcatcacaaacactaggctaaccagaggttagactcgctaatcctttcaacccgccaacccttattatattgggttaattggaatcatgccattacatatttacctattttgaaaaatgtcatcacaattcacctaataggaaatatgccattacaattctccctctatctgagacatgccattttctacgccctggagaccgttgggcccacgtgcagaccattgtaatttcgtattgcccaaactgctcctgtctccaactcgctgacatgtgggccctgtcttccatctcttctctcccacatccgagtcttcaagatgggtagatgctcgcctcacaagcctttaatcgcaggccagtcgtatgtaaaaatatgttttgaccgtccgaggaaaaaaaacaagttcatagcagtgatgatgaaatgtgttaaatgttgcgataaatcttgaataaaattcgacagaaattgagtggtttgattacgagagctccaaaatttgaacgaaaatgtgaaccaaagttatgcattaatacctattccctgagctcgtggttgttcttcttcctagctggagtaggccttgggccagcacccgcggttgttggagtcagtgttgtaaaaagatgaaaaacagctgtcaagcggatgcggatatggtaccactaaacgatttatcggaatacagatgattagtccacataatatgaaaatttattgttcacaaaaaattgtatatttgcttattagtttagttttactgctattaaacaaacattaattacattttttaggtctgaattaggtctgagttgcatgctgctgcagagcaggcgccggcggagcgagtcaagagctcaaacaaacgcaatgccccttaattaactacttctccgtttcatattataagaactaggtgaaaccccgcgcattgctgcgggaatttagtatgataacaataaaaaaaataacatgtaaaatagttatataacatcagattaagtaaattaatgtggtttataataatttaaatttaaatagtatgtagaatggtgattcaaacataaaaagtaaggtggtatgattttatggaagaagaaaagtagagagataatgtggaccgtagattaatcatctaaaggctaaaaacaattgatgcgatataacttaattagaggaaaaaaggagaaagataatttggaccatagattaatcatttaatcactaattaagtgaggatgaactatataaatatatatatataggatatcataaaacataataaagatatacattgaaacattatgtgaattatgttggatgataatttaacatgtttgtatttgaaaagctcttaaattataaaaactataaagatatggcatgtttgcatgatgtttaaatgtcatgattgttaatggatgatgatatgacatcttgttaattagtggatgatgatctggtattttgttagtggatgatgatgtggcatctttgcatgttaagcttaaggagttagtggtggatcactttatagtaagatacatgctaccagttattcctcgtaaacaagcgatttattgatatttacgtttctcgatgcccaagtagccaatcttgtgtggaagaatgaatagtcacgcattaaatccgagaaagtcattaagatgataggttgttggattgaaatatgtctatcaaaaataaaatttttagatttgaaaatatgactatcaaaaatacattgagggagtaagtcataattaacaaggtgcagaatttctcgccttgtataaattataatactcctacgcagccccctggatttttacaatgtagcaacaataacaatcatgccaattaattacattgagccgggttgattgaggccctgtttagttacaaactttttcttcgaaattctaactttttcatcacatcaaaacttttctacacacataaacttccaacttttttatcacatcgttccaatttcaaccaaactttcaattttagcgtgaactgaacacagcctgattcgaattaaaagtcgtctctccagctgcttcccggcctgtctgcttgcagttgcagcaacttttcgtccattcggatatttcttagttaatgtcctcccttatctcagtagcctgcattagtttgaaaacttcaggagatcaacgactgagtttaaacttatttgccccgcacaaccactttttccatatcacatagatgcaattaactagcatatttttttaaaaaatattccaccatcaaaatccttaatctcattagatgcatgcattttattcgttaagggtgatctaaacataaagataataggggcaattacgttttgaccctgttttagaacctaactaccaatttgactctactttttcaagtttgcttatttgaccctcattttcaaaactgaagatcagatctgaccatcttccgttaaatcaacgtaacggtgttaacatagacaaaaaatgatgtttgtggagaaaattgcatatctaccatcgcataaaattggcttcgctagactaccatcactcaaatgggcttcgctggaataccactcccaaaccatgggtattcgctgcaatgccattttcatggtttcttgcatttgaaaattatttttcggcgattacacattttcgtagactgttatgcccctagttcaacttgtttcgcttcagaagaggtgaagcggcgacgccggtgtcgccgaccggtgccgagctagccgccgcgccgcctctcctcgccgacccacgcgccgagcgagtggccgacgaacacgagcctgcaccccgccagcccgacctctgccaccatccgccggatcgcggtgccctctcggtcgagcagccacacggtggcgcggaggagcccgcggtgctcgtggccgcccgcgagtggctcggacccgccggcgtcgaggagcacgcggtagtcctcgagccgcgcgagtcctagcctgcacacggcgagcacgacgtccccacgcgcgcagttgtgggagaggcggtacggcgggcacagccatcccgcatcgtatcggcccaggggcatcgtatcggccgccatcccgtatcgccgttgctcgcgtcatctcggcctcgagctccgccggcccaccccgactcaccgaccgacgacgacctcacctcgacgcctcgcctccgccggcgattggcacgccggtgacgacctctcaagcatggagaggaggaaaaaaaggttgaattgagagaggaggaaaaaaaaagcccgagggcaatttgggcacagtaaatctaaaaagagagcaaaatctttttcatttactaaaagtgatgaaaatggcaaagtatcaaactacactcagttgaagatggtattccagcgaagcccatttgagtgatggtattctagcgaagccagttttatacgatggtagatatgcaattttctcatgtttgtggccttcttattcacacgtttgttacgtcttcctccttcggaacaagaagacagtgtcgtcgtcctcttcgaagcgagaaggaacaacgctggcgccggcaccgccgtcctctccttgcctgacgccgaccgccgccgccgtcgagccatcgccagatccgcctcctcgccatcaagccgtcgccggatctgtcacatcaccgccaccgcaacttcctccacacgccgccgcagctttctccgctgagctcccgcacgtcgccgctccctccctccacgaggcggcgccggcatggatccgctcgctccgcgccccttcgtcgttgatccctcccatcacgaggcggcgccgccgcggatttactccctccatgcccctccgccgccgtcgccgctctatccccccacgaggctgcgccgacgtggatccgctccctccgagcccctccgccgccgccgctaccatcccctacgagccggcgcggccgcttcctctctccacgagccggcacggacccgctcctcctgcgtccctccgccgctgacgcccaccgcggccccctcgcagccccctctcagccccctcgccgccccctcgcagccccctcgccgacgcccgccgccggccccccgacgcccccttcagagctcctccaagcgcactctcagcgccgctgccgccccctcagatgagtgccgccgccaccccgtcagatcgcccccacgacaggagcaggccgctgccgcctcacgattcgaacgagagagagagagagagtcacacgagagagatggatagggtttctgagggtattttgagcattagaaatattagtagcattttctttttttacttttatccaaccctaacggagtagtggaaagggggtcggacggcagcttcatttttaaaaaggagtgtcaaataagcaaacttcaaaaagtagggtcaaattggcagttacagttcaaaacgagatcaaataagcaattgtcctaagataataataatggtttgttgatctttaggttagtggaggttgtgtcttatatttaaaaatgaaaggagtatttacatagatcatcttgagcaatcgagatctctcctctattctcccaaacgcacatgcacacacaaacacgaacaaaagaacaatggagaggcatatctataagtggaacgatatttaccacacataaaagataaagaattttgtttgcaatttgattagtaaaaaaaatttcatcaactttctcgaatttgtgtgtatgatatatatagtagagagacctactaaaagtaataccgaattttggtgtaagcacaattcaactcgtcccacaagtttattcaaccacaaagggcggggaacccatgttcactatgtgatggcagaatcagccattcttttagaatactctcttcggttttaatttaatatatgacaacgttaagtatttgagatatgtttgactattcatctatttaaaaatatgtaactattatttgttttgttattaattacttgatttattaaggttttgtagcacatttgtattttttatgtttgagagaaagttaagtaagacgcatagtcatacctacacatgtctaaagtaaatatcgtcataaattaaaatctagaggagtgcaatagatgacagtatagtctgacttttggttggaacaattcgaacccattgaacaagatccagacttataacttgacgatttccatgcatgttttgaaatggattaatatcaaaatgtatctaattgactatacaattcaaatcgaattataggagtatgctactggagtactaattaagattgctcatataatatttaattattttctgagaacatgcaggagtgctgcattgaattgaaggaacttgtattacagactgcttccgttttttttcctcaatgtctacatcaaatgacattccatacatgtacttttatgaagagatacgtgataaaatatcggaaaaggctatacgtactatttttttcttactaaattcttagtaacactgatcactggtggagaaaccgtttgtagtctcggttggtaacccctttagtcccggtttttcaaccgggactacgaatccgggactaaatatcactatttttagtcccggttcaaataaccgggactaaagatcgatctttagttccggttggtgttaccaatcgggactaaagaggggaagcgacagttcctcgagatttattattattattattttgttgttgatttgctaatggatagtgttaatctatgtattttctcctgaatcgaatgagatgcacatccccaaatcaacatcacaaatcaaatacatcacaaatcctacacagatcaactacatcacaaatcctaaaaactacacacaaattaaatacataacagattatacatcttagatccatacgatgcaatgaatcacaaaattatacatacagtgaaacacaaaataaaaaaaaaaacttggaatcagcgggctgtgccgcgcacagccgcctgcccaccgcccgccggccgcccgcacacgcgcggccgcgccgccgcccgccggccgcctccacgcacgcggccgcgccgcgccgccgccgcccaccgccgtcggcctcctgcctgccgccgcctcccccttcgcggccgcgccgccgccgcccgccgccgaccggtgatggaagacggagtagaggggaggaggaggaaggagaggggaggagaagaggaagggggggaggggaggaagagagggaaggggaggaggaagaggattggatctgagaagagcaagagaagggatgttccaatcttatctaaatatctatctgggacttaaccgatcggatgtgggagagaaatatttactcccggttgataacttcaaccgggactaaagattgatctttagtcccggttggtattaccaaccaggagtaaagatcgatctaccaaccgggactaaagtggtaatttttagtcctggttggtagtatcaaccgggactaaagatcctcgaccccctgacatacatctgacaggcgatgaaccgggactacaaatcatctttagtcccggttggtgttactaaccgggactaaagatcaaaattttttaaaccgggactaaaaatcgtttttagtcctggttttttatgaaaccgggactattgtaaaatttggtcgaccgactaaaaatggtttctccaccagtggatgtgtcatgctaggagtgcatctagtttcttataactttcatatacttaaatcaaacggttgagatgattgttagtaaaagtttagtaagaaaaatttagtacgtgtagcattgctctaaaatatctatgttgtctaatattcttaatctgttttgtaattactttgaccacgtacaataaaaagtcacgaggacataaaaagtcaacttgtcgtatagtagtgttcctgaaatagcgtagactggactctgtccacttgttgacagctgcatgccgccggcatatattaatatatacatccagatagaaactagcaacggaacttaaaattcaacaaatcaaattaactaacctgtgatagtatactactggagcatttggatatccaaaacaattattgaagctaatattatcgggggaaatagtcgtacgtagtacggtagttgcaagctagtgtagtctatgttgcagggccatgcaaagaggacttgatttttcctctctgaagactcaaagcctgaattaatctctgtacgtagtttggactttgaacacgccactaatttaatcaaccactgcctcctatataccttctgctataaataacgtaaatcatcagctgatcaccaagcagtcaagcacttagtagtcaggggaagctcaagcacttagagtctatttgagagcttaagattcgaataaacagctaactagcagtcagcttctgaggatctgaaaagctgggtttttcagcttctgactactagtttatttctatagattctacgaccacggcttctcagaatctgagtgaatgaaaagttgaactgtttagagaagcttccgattcaaaaggaagctacagttgaaaaagaagtttttcaaacaaaccattcatctccctctttgcttgctagccatggatgggctcttgtaccaagcgctcctcctctccgcgctcgccgtcgcggtgctccagatcgtcaagctcgccgtcgtcaacagagggaagaagcaagcggcggcggctgcaccgacgcccccggggccatggaggctgccggtgatcggcagcatgcaccacctcgccgggaagctggcgcaccgcgcgctcagggacctcgccgccgtgcacggcccgctgatgatgctccagctcggcgagacgccgctggtggtggtgtcgtccagggaggtggcgcgggaggtgctgaggacgcacgacgccaacttcgccacccgcccgaggctgctcgccggcgaggtcgtgctctacgccggcgccgacatcctcttctcgccgtccggcgagtactggcgcaagctccggcagctctgcgccgccgaggtgctggggccgaagcgcgtcctctccttccggcacatcagggaacaggaggtgaacattgattatcagtatgaatataaatattaattgacacatattctggtcacatatgtgcttaaatgcatgcttgatcactagtttatgttggtatacgatcacagaacctataacccaaacatgcgattgcaactgatctagatataatcaaaagattgtttgcagtttgattagtaaaaaaatttcatcaacttcctcctatttgtgtgtatgatattatatagtagagagacctactaaaaataatactgaattttcatgtaagcacaatacaactctaataccgaattttggtgtaagcacaatacaactcgtcccacaagtttattcaaccacaaagggcggggaacccatgttcattatgtgatggctgaatgagccattctttgaaatactttatgtggtttttaatatatgacacgccgttaagtttttagatatgtttggccattcatcttatttaaaaatatgtataattattatttgttttgttattaattacttgatttagtattaaatgcttttttagcacacttgtattttttaatgtttgagagaaagttaagacgcatagtcatacctacacatgtctaaagtaaatatcgtcataaattaaaatctggaggagtgcaatagatgacagtatagtctgacttttggttggaacaattcgaacccattgaacaagatcctgacttataacttgacgatttccatgcatgttttgaaatggattaatatcaaaatgtatctaattgactatacaattcagatcgagttataggagtatgctactactaagattgctcatataatatttaattattttctgagaacatgcaggagtgctgcattggattgaaggagcttgtattatagactgcatcttttttttttctcaatgtctacatcaaatggcattccatacatgtacttttatatatgaagagatacgtgataaaataatctatgttgtctaatattcttaatcttttttgtaactactttgaccacgtacaataaaaagtcacgaggacataacaagtcaacttgtcgtatagtagtgttcctgaaatagcgtagactggactgtgtccagttgttgacaaatgacagctgcatgccgccggcatatattgatatatacatccagatagaaactagcaacggagcttaaaattcaacaaatcaaattaactaacctgtgatagtatactaccggagcatttggatatccaaaacaattattgaagctaatattatcgggggaaatggtcgtagtacgtaattgcaagctagtgtagtctgtgttgcagggccatgcaaagacttgatttttcctctgaagactcaaagcatgaattaatctctgtacgtagtttggactttgaacacgccaaccactgccttcctatataccttctgctataaataccgtaaatcatcagctgatcaccaagcagtcaagcacttagtagtcaggggaagctcaagcacttagggtctatttgagagcttgaaattcggagaaacagttaattggcagccatcttctgaggatctgcaaagtagggtttttcagcttctgactactagtttatttctatagattctacgaccataggcttctcagaatttgagtgaatgaaaagttgaattgtttagagaagcttccgattaaaaagaagctacagctgtaagaagttttccaaacaaaccattcatctctctctttgcttgctagccatggatgggctcttgtaccaagcgctcctcctctccgcgctcgccgtcgcggtgctccagatcgtcaagctcgccgtcgtcaacagagggaagaagcaagcggcggcggctgcaccgacgcccccggggccatggaggctgccggtgatcggcagcatgcaccacctcgccgggaagctggcgcaccgcgcgctgagggacctcgccgccgtgcacggcccgctgatgatgctccagctcggcgagacgccgctggtggtggtgtcgtccagggaggtggcgcgggaggtgctgaggacgcacgacgccaacttcgccacccgcccaaggctgctcgccggcgaggtcgtgctctacggcggcgccgacatcctcttctcgccgtccggcgagtactggcgcaagctccggcagctctgcgccgccgaggtgctggggccgaagcgcgtcctctccttccggcacatcagggaacaggaggtgaacattgattatcagtatgaatataaatattaattgacacatattctggtcacatatgtgcttaaatgcatgcttgatcactagtttatgttggtatacgatcacagaacctataacccaaacatgcgattgcaactgatctagatataatcaaaggatttttcacagttagtcatatttagttttaagtcaacttttactgtggtctttattgtcagtagaattaatctagatatttcatttcttatttaatgggccacatctatttgtattatcttttcaactactcgtatagtaatagaaaaaataaacataatcaatggcttagatcattttttttgttagtaataatactggtagtatggttactagcagtagacacctccgtaaatttaagtaactcttaaaaatttcaaggtgatctcaaatttctaatacatctatgcttcttctatctagatggcgagtcgggtggaaaggatccgtgcggtcggaccatcggtgccggtggatgttagtgcacttttctatgacatggcaatcagtatcgtctcatgtgcatcctttggtaagaaacaaaggaatgctgacgagtacctttcagcaataaagactgggatcagtctggcaagtgggttcaagatccctgacctcttcccgacatggagaacggtgcttgctgcagtgacgggcatgcggcgtgcccttgaaaatgtccataggatagtggactccaccttggaagaggtcatagaggagaggagaggcgctgcaagagaatgcaagggcagattggacatggaggacaacgaggaaaacttggtcgatgtgctcatcaaattgcatgagcaaggtggccacctaagtagaaatagcatcaagtcggtgatatttgatatgttcacagccggaacaggcacgttagcatcatcgctaaattggggtatgtcggaactaatgaggaacccaagggtgatgaccaagctgcaaggtgagatccgagaggcgtttcacggcaaggctaccgtaggggagggtgacatccaggtgagcaacctcccctaccttaggctttttatcaaggagacccttcggttgcaccctccagtgcctcttcttgtgccccgggagagcattgacatgtgcgaggtcaatggctatacgatccctgcaaggtcacgtatcgttgtaaatgcatgggctattgggagagacccaaagtattgggatgatcctgaggaattcaagccagaacgatttgagggcaacaaggtggactttgcagggactagctacgagtacctacctttcggagccggacgaaggatttgcccgggtattacctacgccttacctgtcttggagatagcacttgtgcagcttctataccacttcaattggtcactcccaaagggtgtcaccgaggtggacatggaggaggaacctggccttggtgcacggcgtatgacgcccctgctactatttgccaccccatttgttgttccattattgtaagacagacattgattggtgctagctggttgacttagaactcttgtgtgtactagtagcatgtattttttttttgttttcattccatggttgaccttacatgcctgtaggcttacacccccaatacatcaaaaggttgtgttccttttacaattaattaatataccgtcctatgtttttcatgtagatagctacgaagacatatattaacatagactgaaatgctcaataaagagtctagaatgtatctggcatcccgtcccatttatatattatcacccattcgatccatatattagcatttttaagatgcttattagtacatattaagtatgagggggaaaaactttgatagcccttgttaatttgcatgtgccatttcatgatcggatgaggttaagagatgaagcatgctgttgcacaagaggttaataatgaactatccattaacaagactatagtcctggaagattataattagaaataaaaataaagcactatgtgccgacaaactccaacacaccttgttgaggaaaaaaactatagaaccatacgatcactgctatgcgtggctggacattgtctagcttacaatggagacacataagtagggcctatcacctaaatctaaagacagttgaacacaacgcacttgtccctcacatagaccagtcactatcatgatatccaagtattgtcgcaatcgaaacagtctttaggcgttaaaataattttggatcatctacatgggtgttaatatttgttttctcaattaatgtcggattttacttaggatgagcatatgtaggtagtaagacagataggtagatatagatggtggcaatgatgcatactgaagattcaatatttcttttttcttgatagatagatagatagatagatgtaggagtaaatatcatacaagtgctatttttctaagtcaaaactatctgttgctgttgattatttgggaaaactacaaaaatagttgatgattctatcataaaaccggtttgtgatagattattaccgaagctattgccacatattatctaaattatcataggaataataaattaaatattttagaaataaaattaataaaataccttggaacaaagtgacctaattaacaatgcagcaaaagaaagtttctgagaaagtgtatatttagatacatgcagcaaataattcatggcaataatccagtgaagaacttagaggaacggcgctaaaactaccattaataaaattaaaaaacttatagttttcttaatttaatattgcattgatagatagagagatggagagatagtggatagctagaaatttaatattgcatctttctatctctctagctatccactatccactatctttctagatagaaaggacttcactgcccctgccatgccaaccgcagcttctacctcttctacatatatgtgcagcacatacacaagcacatgccacatacacagtacagagcgccgccacagctcacaattaaccttggcaaccatggatgagctcttgtacagagctctcctcctctccgtgctcgccgtcgcgctgctccagatcatcaaggcgttcctcatcatcatcagggcaaagccggcggcgccgcccctgccgccggggccatggaggctgccggtgatcggcagcatgcaccacctcgccgggaagctgccgcaccgcgcgctcagggacctcgccgcggcacacggcccgctgatgatgctccggctcggcgagacgccgctggtggtggcgtcgtcgagggagatggcgcgggaggtgctcaggacgcacgacgccaacttcgccacccgccccaggctgctcgccggcgaggtcgtgctctacggcggcgccgacatcctcttctcgccgtccggcgagtactggcgcaggctccggcagctctgcgccgccgaggtgctggggccgaagcgtgtcctctccttccgtcacatcagggaacaagaggtacatatataggttacacacattagcttacactacttaacaattttagggccttgtttagttccaaattttttcttcaaactttcaactaattttccattacatcaaaattttcctacacacgtaaacttccaacttttccatcacatcgttccaatttcaaccaaactttcaattttggcgtgaactaaacacacccgtggtgtttggatctaggtactttagtctctgtcacatcggatgtttcgacgctgattagaagtattaaacgtagactaataataaaactaattgtataaatgagagataattcgcgagacaaaatttttaaacctaattaatctataattagtacatgtttactgtagccacataggataatcatggattaattaggtttaatagattcatctcgcgaattagtctaggattatggaatgagttttgttattagtctacatttaatacttctaattagtgtcaaacatccgatgtgacagggactaaaattttagtccctgatccaaacagacccttaattaacacattctaatcacaaattcacattttgaagtgtggtagccaaaacatgtgcatcatcgacatcagacgtttttttttaatgaaccggtacttagtgtgctaatttaattggatatatatataataggagtatatattgtacaagtaagaaagaatcatactaaaaaaagcaaggggataagttttaagggtcgttttgctccagatacggtctagattttgatctcctccttgattttcgccactagggttgtcgtcgaaagctcattgtgttcaaacactctactttctctctttcaaaattacataagtacatcaaaagaggtttggtagctaatcagaaattttgatcacaatcactaatatcctaatacaacatgttatttttacatgtagatggagagtcaagtggaagagatccgtgcagcaggaccatcgacgccagtggacctcaccgcaatgttctccttcctggtgatcagcaacgtctcccgtgcatcctttgggagcaagcatagaaatgccaagaagttcctttcagctgtgaagaccggggtcactctggctagcggtttcaagatccccgacctcttcccgacatggcgaaaagtgctcgccgcggtgactggcatgcggcgtgccctagaggacatccacagggttgtggattccaccttggaagaggtcatagaggagagaagaagcgcaagagaagacaaggccaggtgcggcatggtgggcaccgaggaaaacctcgtcgacgtgctcatcggcttgcatgagcaaggtggttgcctgagtagaaatagtatcaagtcagtgatattcgatatgttcacggctggaacaggcacattgtcatcaacattgggttggggtatgtcagaactgatgcggagcccgatggtgatgagcaaattacagggtgagatccgagaagcgttctatggaaaggcaacggtgggagaggaggacattcaggcgagtcgcctcacctacctaggattgttcatcaaggagactcttcgcttgcacccgccggttcctctcctagtgccccgagagagcattgacacgtgtgagatcaaaggctacatgatcccagcgaggtcccgcatcattgtaaatgcatgggctatcgggagggatccacgatactgggacgatgctgaggagttcaaacctaagcgcttcgagaaaaacatggtcgactttacagggagttgctacgagtacttgccttttggtgcaggaagaaggatgtgccctggcgtagcctacgggatccccattttggagatggcgcttgtgcagctcctctatcacttcgattggtcgctgccgaagggtgtcgtagatgtggacatggaggagtcatctggcctcggtgcacgacgcaagacgcctttgttactctgtgcgacgccatttgttgttccagtattatgaggcacattcaagatgtgctagttgattggtgtagaagtcctttttctttttaattgtgtgaaattttcttttccatgcatgatcctcagatgcctttgggcttgccctccaaatcatgaaaggggtgttttattttgtaataatgttattatgctgcatcaaagacaacaacaaattaaggaatcatttctccatttttaatcttaaaagtgcattgcatcatcctgtgacaatttgtaagtttcacagttgacactaaggaagtaatgatacctagatgcgtaaatataactcaaaagggcatgcttggaggcctcttttaggcccaaaacttgtgtagactacatgccaacggaaaataagtttttttatttctcctatagtggtggtgttctttgcgatctaaaactctcttatggccaatgtaaatggaaaattatatagtgcgaatcacatatataagttgaaaacttaaaagctaccattaaattaaaaaatagacacctaagatttatccacatcaccaatagtaaagtactctcagattcaaccattagaaaaaaaaaattactacgagtaaaattttttactttgtgatatggataaatctcaggcatccacttttagcccaacggtaattttcaatttttatgtggtttccactgtatattaaaacagattctggcggattgatttgaattttgttctcgattctgccatgttgtttataaaaaatgcagtcatttggggataagagcaggtacaatagcgggctattagccagctataaacatattttattgagataaacgatgagagagaaaagcagcgggctacagatatgtagccggctgtagcacggactctaagacacaatgtgtgtatgacaggtgggaccatatattaatagtatagtaagcaactattgtatgaattggttattagattagatatggatgaattggagttagtagtgggttataccgttaaacttgccctaaggtatgttttgtgaccgacagttactgtttttttattttttagaggtgaataaaaattgggcgactcccaaacaggccatttggtcttatttattgtcagtttagtttgcagacacagtagttcagtaggaaatgtgttggagtagaaatcccttaacgcgcaaatcacacttatggtgtgtttggttcacggtcatatatggatgagatatgaccattcatgtttattggatatgacgatttaattttttgtttggtttttatagataggatggatccaattttttatttggttggagggatataagatgaatgggataaaccaaaatttagtggggccattatcatacatattttttattaaaatataatcatccaagatcttgttttaaagatttaattgtaataaatataatagtataatcgaatcccaaatcagatatacggtttaggagaaaaaacatttagagcttaactgaagattaaaccaaccacaatcaatcagaataagccacatcacccaaaccaaaatatggatgacttcatctggctagtcagatccactcatccagcgtactcccaccattccaaattgatctacatataatttttttgaggttattcctaaatgatctacatatttgtattcatttattaagtctattcgttatttgtgtattggagtaaatggacattgatgcatgcatccatacacacaagtatttataacccacatgcaatatcttgatttgctattgactaggaaataatggggatgatgcatgcatcgagtttgttgctagaataaatatagtatgagagaattattagctttttttggtcttggtatacctatgaaatatgtagatcaatttagaatggagggggtattaagagaatatttcattttttgaaccgccccatccaccctaccctccaagaaaaaaaaattggcatcatctctcatccaaccaaacacacacacacccttacaaaatgcataataatatcgctttgatcaacatgttgaattactaactatattagtaatgaaaagaagctaaaattctaattagtcaaaccatttcatattataaatcattttgagtaaatatcagagaaccccatgtacatgtacttgtgtttcataaacccccatgtcgaagcacctggtttcaaaataccccacgtaaattgatcaaggttcaaaaaaccccatgtctaagcagtttggggcatttgaagttcccagcatggctgatggcccatgccactcttccagcagtcgcattcgtagctaatgtgaaggcgtggtcaatgcgggtgcgaggtcgcaactttaggcgagatggaacgctcagccattctctcgcttctctttctcccctgtctcgttcactcgtctcccattagggcacctgctagacgatgccgctgaatgctggaagataaaggatcgcagtagaccatacggccacgagaggcaagcagctcaagctatatggttgatatatggcaggtttctttgcggtatttgttggagattatgttctaggatttatttgatttggggcaggacaaatgctagattgatcccttttcttatatatgcttttttctaagagtttaatttgaaattgtgtgttttggtgatttggcttatagaattgatattgtgatgttgaaatcagcaagctgattataacaaattttctgagaaagcagtcaactagggagaggtggcagtccacttgttttgttttgtttttccctgggatcgtcatcgtttagttgctgacatccgccagcttcttcttgctgcattatgcatgtgtcgcttcgtttcatccgtagcaaaaggctaacgatcgttgagacgatgtctaagctgcaggtgggccacgagccgagttggcaagacaaagatggccctaaactgtttaaacatggggttttttcaactttgatccatttacatggggtattctgaaaccagatgcttagacatggggttttttgaaacacaagcacatgtacatgggataagactagtttctagcatgataattggtttcagtactgttgcctgaaggacatagcacctttgtgttttaaactggccaaaagaaagcagagatgtgtccttcatgaactcctaaacaacaactggattggctcctttaggcaattcaccacagtggaagagctaaatgaattagtgcacttgggaagcttgctccaagatgtaaatctttccgacagcatagatgatatctcttggaattggaatgagtcagggtcttactcatccaagagtgcatatctcttccaattcgaaggatccttcacaccaattgacttctcctcgctatggaagacgccggctgagccgaaaattcagttctttggatggcttgtccttcatcagaaaaccttaaccgcacaaagcttacttcacagacattggccgtgtaattggatttgccgtctatgcacatgtgccttcgaagacaccaatcatttgttcagcgtttgcagcttcgtcagagaagtatggaactttgttcgctcctggcaagctttgccacctgttattgctgatcccacggccggaacctccgtgtggtgggctgcaatcaactgcgttctctcaaaggatcaaaagttggcggttagaggagcactcctaacaacatggtggaatgtttggttagagagaaataataggattttcgctaataatgctaagaccgagcgtgaggtggcctatgtcataaagcaggagcttgatctccgcaagtcggcttttaggccgccttgatgtcttctttgttttctctaactggcttgcaagcactatattttctctttctaattaaatttcggcagagctcctaccgtcgatttccaaaaaaacaagcacatgtacatgtggttctttgatatttactcttttattttacaaatttgatttaatagaaattcaaagtgatttataatatagaacgaagggagtaattgacatcatcgtcacacaatcactgaactgtttacatggatataatcgtaatctacacagcaaacagaaaaattcttacagttgttccagtaaattgtttcttagttacgccttgcgctgcaggaaggcgtaggtggccccgatcgcggcggcggcggcggcgatctccaaggcgcgcggcgtcaacctggccgcccccgtcagctggtaggcgaactcgacggcgaggagcgccgcgagcggccacagcggggccttgagccggtccctgatccccggcgagccgcggggagctccctggaaccgcgtgaggaagtagaagtagagcagcaggaggaggtacgggtaggcgaagacggcggcggagaacggcgcgccgcgctcgaagcggcgcatctccagcgtggagttgagggctgcgagcgagtagcccacgaacgtggcccaaccgtcgccgccgccgccgtcggcggcgtcggcttggggatggtgatccgccggcggtgggagcgggggctcctcctccggcggcggctgcggcggcgcttggcgggaggccatcgtggtggatcggagcacgccgcgatcgagaggatgcaatgcgaggtggaggaggaggagtaggtagctcgcgagcaggaagaatggcggagatcgaggagagtaggcgacgagacgactcgcgattgtcaatgattgtaggcgcgtcacgcgtggacttgaaatgtgatgcgagatgatgaaataaaaatgaaatgtcctgcaatttggtgagtttcaaataagattcgacgtaaattgagtggtttcaatttgagatgacgaaattggagttagattgagaattctgtgagttgaagtaaactctcaaatttgtgcctagtggtccgaaaaaaaacggagcggtccattagcacgtgaatacataattaattaagtataattaagtattagctactccctccgtttcataatgtaaatcattctagcatttctcatatttatattgatattaatgagtctaaacatatatatctatttagattcattaacatcaatataattgtggaaaatgctagaatgacttacattgtgaaacagaggaagtattttttttagcacgtgataaaaaaattagaaatatgatttttttaagcaactttcgtattgaaacttttttaaaaaaaacacaccgtttagcagttttaaaagcgtgcgcgtggaaaaagagagggtgagttggtaagaggattccgaacacacccttactctctatcttaacattctgagagtttgcaatctaaactcactcgcacggacaataatcgagattgaatttgtgaaataacaggataatatttatcatgaaaaattgttcgtgtatactactttttataatctttttggtgaacatcgttatcatagagtatggtaatggatgcattgacatatatatacagtagtccctaacgatatattgaaaaatataatgaagataaaattgtgtttggtttctgcacctttgaacatgaaatgtttggttatataaaatttattattactcataaataaatcgagtttgaatttaatgtttttaaacttcaatagatttcctatatatttgtcgacaaattttctcctaaaaatatgacagatataattatattacaatcataatgtaatcacactgtaacttaacttatatgtaattacactgtaactacaatgtaacatgtatgtaactttcaaaaatctccacataacatgttatttcggtaaaatagagatcatgggatcaaatcctctcatatgtgcgtactgtgacttttttcttcttaacctgcacaaaacttgaaatagatctaacggtttaaaactatatgaaagttacatacaaattacattgtacctaccgtataattacatacaaattacagtgtaattacactataattatattctaaatacatctgttaaatttttaggagaaaatttataggtgatcccgaatccaatatccaagcccggctccggccaaagcccaaattgcaatccctacatgggccaaaaatgcccaaaaccatcgaaacaaaacgaatccttttctccttttctcgcaaaatctccaaaaccgcttcggcttcctctctcccctcacggcggccgtcgcttcgttcgccgattagccggcgccgccgccgccgccgccggtagagaacccaccccctccccgcatggccgccgcgggcggggccgcgcagccgccgcggcagtacaagctggcgccgcagagcgagctgcgggtggaggtgccccccgacgcgcccgtccgcgtccgcctcgtcgccggcacggcggaggtcttcggcaccgagctcccccccgagggctgggtccccgtcccgccccgctccaagatcgccgtaagcgcgccctcctcctcctcccacatcccacctcccgcggaggagaagagacccgccacgggattcgcctcgcctcggctcagctttgctgcgaccactgatttcttgccatttggtatgtttcggggtagattttcacctggcacggcgcgacggtggagctggacggggtcagcgagagcgagtacacgtccgacgaggtgatttcttcttctccatattctaatccccctgtgaattttggggttttgagcttcttccaatgcaatgcgatgtggttgtgacatagtactaattacatgctcatggctgtagacaccgatggtggtttatgtgaacacccacgcgatccttgacgcgaggagggcgagggcgagggccgccgcggctcagggtgccctgccggagtcctcgcaggtttgtgatctcgtctctctcggtttggcatctcgtcatgcaagttattgcacggttaattggtcaaaaattgtgtagtagatgcacactttttgattctgttatgtatattacataattgcataatactatgggatggctagcatgctaattttacagtttgttgcacatgaggtgttttagattcctagaaataatatagtgtgtgtgcctgtactatgtactccaacataaaactagttctgtttaacaaccaatgtgttagagcaataacaggttacaagttgatgagtaccctacggtccaaaattgaatatgggtgttgaaaacattgaaacattgtgcgaacaaagggtatatttatcccgaggtttttgggctgtcttgcttagttttgcctctcttcgcggtttagggacccagagtgatcattgtggggccaagtgattctggaaaaagtactttgtgcaaaatgctccttagctgggctgccaagcagggctggaagcctacatatgtggatttagatattggccaaggttcgataaccatacctggatgtatttcggcaacacccattgagaagcctatagatatagttgatgggattcccttggagatgccgcttgcatacttttacggccatccaagcccaaggtatgtcgttcccactaaggccttgttcggttacgcttggattcaatccgggctgggaataacaagtatagtaagaaatttatgatagatacaatgagagaccggaatttatttcgggccgggaaccaatttactcatgatagggataataagagacctggaatcaatccactagtcaagaggtgtggaactaatcccggcctcttattgtccctatcatgagtaaattgattcccggcctggaataaatcccggtctctcattgtatctatcataaatctcttactatacttgtcattcctggcccagattaaatccaagcgcaactgaacaaggcctaactgttttttccatgtattttatataaagacttcttttcttctactcaacttttttggcacctcaactatttctttatgttgctgacagtgttagtccagatgtttacagagctcttatgaaggagctagctcagacattggataaacaattctctggaaattctgaatctagggcagcaggaatgattatcaatactatggggtgggttgaaaaccttggtttagaggtaattttatttgtttcatgagcaacttagattttggttatgtgtgttgatggctaatatttatattctagcatgagttaattcaccatttgtgttgtgcagttacttcacaattcaattgagattttcaaggctaatgtaatattggtattgggacaggcaagtgcttctgttttcttcatagtgttgtagaactctgttcaaatgggatgtcactatcgtacttcatagtgctatttcaggagggatatgcttgtattatagggctgtggagagctctctagtcatttagtattccctgattcttatgtgctgccaagtgtactctggaatctatgttcagtttgatgttgatgatggctgctgtttatatacctcagtatgaatctagggggggcaaccaagcattttgttgaagtattgtattattgtctagacatttgcttgtgtgatatcaattattagcttgtgttatactgtcataggggtagttactgccccccccccctcccctaacaacaacacacacacacaaaggacagcgaaactattgctgttaggtttatgttgacaagtgctatcatgaataagcatgaaatgaaatggtcctgaagattggatcatttgatttgtctactgcaggagaaactatggaagatgctaaaagatgcagcaaaaaataagcccaacattgatgttgtaaaacttcataaatcagaaggtgttgttccgagaaatccaaagtaccgtcaaaagactagaagcttccgtatcaaggtaaattatttttctgataataaaatgtggaagttcctagattcaactttcaaaagtcaatgtttcaatacaaggcattgtttggtaggcaatatgagaaattaattgatgtaggcttaaatacacatgcattactgtacagtgtgactcacctttatgttcatttttctaatgttatcttacaatcgaaggaggcttaaacacacatgaattactgtacaatatcacctcctttttcatttttctaatgttatcatgcaatcgtatgttacatttgttcagttaatgccatcctattctgctctggtttgctaaagctaaattgtaacactcgctttgcaggagtacttttatggcattgcgaatgatctagcaccacactcaaatgttgttaacttcagtgatgtatctgtttacaagattggcactcatcaagctcctaagtctgcactaccgattggtgcagagcctgtggcagaccctactcgacttgttgctgttaacatcagcacagatatggtccacaccgtgcttgctgtttcatatgctaaggaacctgatgaaatagtttccaggtgataccaactgcccaaattagtgcttatgctttacatctactaaaatgtttatgcttagagccatagtcaatacagcttgatacggtgataccttatttatgcatataattggtacatcagggcccaggtataggaaagaaaaatacatagtaaagtttatggaattttgtattgtctttcagatgggtgggtttcttgcatgttttacatgtttgatattattttgctttcttcagaccaatctattatctgtatgcactaaataacttgtctgtgcacagttctagccctagctagtacgcatgtcacagctgttgcccacttaaaaacctgacaaacccatttactctaggtggcagttttcaaaactatttaagatctgtatcatatgatcattagatttatatacttgaaattcaggatatcaccaagttatcctgcaatcattttcagtagtttaccagtgtcattataatctgtactgctggattagctcgatcatgcgtgactaactacaacttctctagtctttcgttaccactacgcaaaaactgcaaaaattgtagcatcctttttcttgtaacaaacctgagtgtacctctttgacaattctggagatacgtttgctataaacctctttgacaattctgcagcaatgttgccggattcatccacgtgacagatgttgacatccaaaggtacccccaacaaccaagaaaactagcatgtacctttttatggattcgtggtaagacctaacttaacatgctctcatttcaggaagaagctcacatacattgcaccatgcccaggggacctgccaagtaagctgttaattgcgagctcgttaacgtggtacgaggcttgatcagctcatggcagaacgatcaacgatgtagctaggtggtcagttaaattaatcagatggatgtaacacagatgtatcccttgtcctatctccgggtgtacgttgtaaacttgcaagctttttagtaaactcaatgcactgctaactaaaacttataacagcaaatttcactcatttctctggaacctatcttgtgaatgatttattctgacggtgctccgctggtgtgtgcgcattaacctctctgagacttatcaattcgagtattctgatgttataatcattccatcgtggagggtgcctataattaggctttacgaaaatattctgcatttcatttgtgtacaaatttgataatggtgcctatgatgataacgcatgaatgacaggtaacctgcataattataaggattagcaacacctggaaaggcataatgaaagatctcaaccacacaaccatgaattcttaaaattgaaattagtagggcacccagctaaaaggatccttgccagctatgaacatgaaacatacaactcattacaacacgctgacccaaattacaaacaaagcaaatctgatgggggatcattgctgaaagcccgaagacgagaactatcttcccatctggagataatttattcggtcatgctgtgagcacatcaggcattgcatccctgtgaagaccgaaaaaaatattaataggggcgatcctaatgcagcttcccttcactgtctaccaataatacaaaatggaagtacataaggagaaaaaaatccagtgcatgtaacttttaacgtcttgtataaaggttgagaagcagcaacaaaatctccaaacaaaagaattgagagacatacagccgggctcgtggaacccgtatctaaggacagaagatctacagaccccgacaccgcggaggagaggagcatcaacacaggtgagttaaaattgtcaacaccacaaattacaaaaagtagtcgggagtcttgcgtgttgtgtctggttcaatttgccgaggagctggatcaaattggaggaagttctgatccatgttttcgccaatctcaagaattgcagccatgttaccacagcgataacagtagtttggtgcactgaagaccgtcacaacattcttgtcctggatgacaaaatcacaagatagaatatctgaatattgcatccaaggcaggcaaattatagtatatcattggtcccttgcaagatgcgggaacatacaaaaaagtactgtcatgaatacagctgaaacgtcttcttggctcatgcatataacactatttttgctataaacctcttcagtggcaccaatttaactgactgacaccacacagtcacacgaagagcaacatcggcagatgttcattcaacatctgcgttcagattctaattcacaattatttgatatatgccttagcagttagcagtttgtggattagctcctccaaaaattcacaagagccagttagtggattcatcggtttacaatcaaacacattgaagcgcacaaaattgtattgagctcttaaaattgttaaattaataacttagatattctccaagattccatgcacctaacaaatatatactacctccgtattttaatgtataacgccgttgactttttgacaaacatttgatctttcgtctattaaaaaatttatgtaattataatttattttgttgtgacttgatttatcatcaaatgttctttaagcatgacataagtatttttatatttgcataaaaattttgaataagacgagtggtcaaacgttggttaaaaagtcaacggcgtcatacattaatatacagagtagttaagaaatgtacttgcgatctcatcataggtattccagcatttccccaggatgggtattttaagatttttcagaaggtatttttagggaatgttctacagttgttcaataaatgagaagaatttataataaaaggtaatgttgaattatgaacgcctacctgacaccaattaaatccttccattacaagttgatgtgcccttgagatgagagatagaccatttgtatggttaaactgttgagcgatatcttgcccaaatgtataacctgctcctctcggtgaaattccccacccgcatctgtcatctgggtcagaccacaaaagatcacacatgggtccttcatgaggaacctgcaagcatttagtgaaatttgtaacattagctgacaaagaacatttgagaaataaagtgcaatttcttctgcaaatgcaacagaagtatgggcacaagagctaacaaatatcaccggtaaccatcataagcacaacctcctagataatcatctactgtgaaaaaaaattcaagagcaacaagtatttgttcaatcatataaaatcatccacatcatgacccacaacacaaacttctaactaaagtgaactgtggtgctctacctagaaaacaagatccatcttcagacatttacaaatttgcagcagcaggaagtggaaatatcatagtaaaaatattcctgtcaaaactaatatagttgaatggtatatccccaatttagacattccttaaaaaggaattggggcctggggtgatggtgcattctacacccacccccatcaagacctttttaagctaacatatggatgcatctccgcatacttgcgtagttaagttttggttgttggtggctgtatactccttttttttgggcaattgagcatacttactactgcattccactctttatcctatagtataattatttggcatcttttgaaatgtgtggactcgctgctagtatatgatatataccagctagataatgcaaatagtaattactacacctaaattgattaattatatgatatatataccagctagataatgctctaatcctccaagtaaaacaaaaataaacataatgtcatttgaaagctaaatagcttattgttttattaatagcataaatagcccaaatagctgcaaaagtttcaaaaatctgccattatcaccagaatagtggcacacaagacatgcagaagtcaaaatttaggggtactgcagatgaaaggtgactaaagacactcgctcatcaagatagtgctagcactgcttcatacctcttgtatacgatcaagagcacggatgttatctaaagtatccaatgatggagagagaccaccgtgaaggcagaacacctataaaatgggtgattcacatgtcaggcatatattggataagcctatatcagttaaaccgcaattagtcaagtaacaaacctggttttctataagagctgtgagaggcaaataatcaaacaagtctgtaaagtatttccatacatttgcatttccatactttctcaagcattcatcgtagaagccgtacctgtagaaaaacagtagttttcattaacccactgaagaactatctattgggttgaaaatattgaaacaagaatattttttagcattcctatcatttaaaaaattgcataaagaaatagctagaaacaaaaaccatgaagcatagtggcaataaaattacaatccaattaaatataagcaacctatgctgtaataaaccacaaattcgtgccaataaggtgaatacagaaggacggatctagcttgaggttctaatctgagaaaatatatgaaaatgacaaaatggtttcacagcattaaaaaggtagattgttacaggtcagcaaagaggcaaacattatgtattagctatttttggaaagtaaatcagccaacatgtttaagattctgattgggttctctagttttgaggtgttaagcactaataactagagtcctgatcaaaaagcaagttgttttctaaaattcacaaaaataatatcctagaatattgatgtgcaataaaagattgcatctttaatgtttgccactttttcgttgttacaactataataattgtgcaagtagctaaaaaagaagaaaatatgtggggggaaaatccaaatctaggacataaactcacacttgagtgatttgtctgctctcatgatttcctctcaatattgtaattcgatctctgtagcgtactttcaaagccaccaacaacgaaacagtctccactgagtagtagccacggtctgcaataacagccatacggtaaacgttatcaacattaggaaagcgaaaatcaatagagatgcgaaacaaaattacagacagaaataaacgcaagcatgaaaagaatcacacgccccatatgcacagaaatgatgggatcgcctttatagtttatagcattccacgaaacaaacatacgatatcagcgcatatacttcaagggaaatcatgcgtcacccctttgtcctactaaataaggataatcacttgtcacataaaagcgcagatcaacgcatcgaaagagtcctgcttgctctggaagcacatttccatttcacgcataatcatcatccccttataccccaattaatgagaattcttgatgatagccacatagcttataaagcccactaagtatggcacccaaaaggcaagaagccaagaactcaagtaggattctccgcaagctcggccaaaccccaacacataaccaccacaggatattcgcatcgacaaatcgaactacaagaacaaaaagaactacaattcagaacgcgagctccagctcattatccccaagattcttgccacgctataaccaccagccatatcaactccatctcatcatcaggatctaaaaaaagaaagaaaagaaaaagagccagcaccaatccccccaccacagatcgaccgaatcgagcgcgcgcgcgcaggggggaagaggacgcggggtatgaactgaccgacgtagtcgcccatgaagaggtagttggtgtcgggcgcctcgccgccgatgcggaagagctcgatgaggtcgtagaactggccgtggatgtcgccgcagaccgtgacggggcaccgcaccggctgcacgttccactcctccatgaggatggccttcgcctgctcgcacagcgccctcacctccccctccgccaggtgcttgcactcccgcagctgcgcgatctgccggtccagatccccgtgcgacgacggcatcctctcccccgcacctcagggaggggaggacggaggaggcgctactgggggctccgggtcccgccgcgcgccgccgccgctcgccgccggcgaggagggtgggggagagggctagggtttgcgggggatcgggggttggaggtggaggaggtggaggtggagctcaagcctccatttctttttccctctgattttattttatacggagacagatttttttattttttttctttttttacaggtagtaaagtgtacaggaagaccagggcactgggttgtttggagtttagtggtaatggaagggtcaaagtgtaattatgtgatgttattgctgcaaagcagaacagcacaagtcagctggtcaaagtagatggctatagtttgatttggggttttataaggatttcttttttcccttttttaacatgtttgtttggtttttaagcaaaaaaaaaacttatattaatcaatctattctgaaatacaaattcttttggcactcgggtgacatagttgaattctacccgtagcgttgtgctttaaaacatgtaatatcgttgccatggttaaaccagatcaaacaaaacggttcttatgtttagaactgaagatgatgtgctatcaaaattatattaaaaacctcgcaaaaaatatattaaaatttctaaaaattaaaaacatatatttctacattgttttcttcgtagtgatgaaaactttgcacctaagaccgtatattttcgctattttggggttctatagctactttattatgtttcattttagactatgaaaagttaggctgcgttcgtttggagaacaaagggagtttgttggagtttgtttgtttcgttttccgcgcgcacgcttctcaaactactaaatagtgtgtttttagcaaaaattttctatatgaaagttgttttaaaaaatcatattaatccatttttaaattttaaaatagttaatacccaattaatcatgcgctatggctcacctcgttttgcgtatcttcccaatcttttcaatcacctctccctcaaacatagccttagggcccctttgaatcacaggaatgaaaaaaacggaggaatagaaaaaacataggattctgacaggaatgtaagtataaaacagaggattgcaaaacacaggaaaaacataggaatgaccgtttgattggactataggaaaaacacaggaatttgaggagagataaagactcaaaggatttcttccatgaggttctacctctggttaaaattcctccaaaacttgtatggaaagtggcattccataggaatttcataggattccataggattcatttatttgattcaaagagttttgtgggaaaaattcctataggaatgaaatcctttaaaattcttatgaattacctttgaatcaaatggggccttttaatgtagcaagaattcttcctgttgatcattttcgataagacaagaatatagcatggtgtaatatattctcacctactaccaaagaagactagtacaaccatgcagcaggttgcaagcacagccatgagcctccgaacagtgatgagcactgacatcaaccttctcccagtcaaaaggcaagcttttgacgtaggaatagatgatgtaggactagaggtaggtggaataatggatagagttccagctgtactgtataggaaaaacataattcaaaataaactgctgtttatacgataacatgctcaggttaaagtagttgtttagagtggcatgcatgcaccatttcttcccatataattggtcctaacatctttctattactgtctttacgtgaaattctttgttgctttcaactggtggctttgtcttcttgggaaaaaaggttgactttcatcgaagtaattaacatttgtgaaaaaaaaaagattcgtaagagaaaattgtgattttccatgtaaaaactattatactgtaggtatgttcggtggtgcttgctgctgctgttgcgacagctgaaaaacggctacaggcaacagcagctaaaaacggccatagccgcatcactgcagcagctagcgttcccgatccgcccctgtttcttttgggtgaggaaggactaaaggctagtttgttttcttcggttgtaggagatttctcaatgcacacgaaaacgaaaaaacttattagcgcataattaattaaatattaactattataaatttgaaaatggatttgtttgaatttttaaacaacttctatgtagaacttttatttgcagaaaaaatgcaccatttaacaatttgaaaagaaattgtaggcaatttaagtattcgtactcataatacatatagaatgtaggctattcaagtagaatatattctcacattaatatcacataatatatatatctcacttccaattgcctcctctatcaatcctaacacatcaaagcattttgagaaggttggcttagaacaataacacaacaactactcacatttacacataaaattcgttagggttatgacataacgagtgctatccttatgtaggaatctgtcgtcgaactatatctgtggacggtatttatagagtatggggatcattggaactagggtgtatgtgatattgaggtaaaaaagacggtatatagggatttttctacatgttcggaccccttgtctgacagctaatagcactactcctattgggcgaagccgatgttgcctttatgtattggtatcactcgaatagaatatttgcgatgacctaatatagtctttgtcggcttgccagcatggacctctcacacatagttgatggttagtgtagttttcttcttcgaatatgaactcgacgagattggaggtagctctagatccctcatgtcggcctttgtggcgcctgcattgggtttgtctatatctgtattggcttgtattttgactttgcatatccctcctcctagtggtgtttgtatttatacccttgggtgccctcttgtataagtaggactagggaaacatgtatagatatgatccgagtagtccttttagtgtcgagtagaactctattttttcttctgtatatgaggcatgattccgtataagattatatatatatatatatatatatatatatatatatatatatatatatatatatggtgggcccaccgagcctaacccaaaactattggatatgccttatctataacactggcaaaatttcaagcataaactatgtataattacatcctttatgtagaacctacgggttttgcagattttttatattttagattttcattagaaaaattattttataaatagatctctagacaaactattttagaaaagtttttttagaggtctatttataaaataagttcttaaaatactaaaatgtaaaacaatccagtacaggtttttctaaaaaaataaaaaccatgcctagaattttttttcacatattcatgctctttttctacgtccttcgttgaactttacttagttttctaaaaccaggaagtatatataaaatgttcaaattcatgtaaaagtttctccattctaaactacacttattagtctcgaatcataatatgtcaccataaactccatcagactgaataaatgatatatttgtctgattttgtgataatattcgagagaaacaaataaactatctactacaaagttttgaaaagttatttcagaatgataataagcaatataaaaagattaaaaagaaaattgtttggaagcttagaaaacaaccatgatataattcttagagcaatctcaatatagaaaacatcagatagttttcatagttgtcatattatatagatagaaactatatactcaatggatggtttcgtcaaaataaattcgtatccaatcacctctcttcaatcttctttcatccacatatcttctcttccattccttttttcttgtggagagtatctagaaaaccgtcggaagttttctaagtgaaaaactttcaaatataactataatataattgaagtgtaattacattgtatctacaatataactgcatcgtaactacactgtaactatgaaataacttatataaaacttttattcaaatatgattttattggttaacaacgagatcttatgcgtgacatgtgtgaaaatttctttctagcaatttttttccttcatgcaaaaatcccgaggcaatccgatagctatgattttgaaagttctggggacaaaaaaaacttgcggaagttttctagcaattttgtttcctttgcagagccggtttcttgcatgaaaaacacatttttattttccttctaaccgttggtcttttacttttacttatatgatagtatatttaatgaaaaaaatttagggcatgtttggcacacctatccaactccacctctcctcagccaaacagtttcagctccacctaaaaataggagcggagcttgatggagctctcttacaaaataaactagagagatggagctgggtttaggtagttccacaactctactccagacctaactcctgaagaaaaatttaaatgaactagagaggtggagctgggtttagtcagccccacaactctactccagacataactcctaaagcaaaatttaaaagttagagctctaccaaacatgccattagctgaggtgaaagggttgtaactaccctaatctggttctaatataacaccggcctctcctatatccggttttctctaaaataatattttaaaaaaatcatataagaataaatagtagttgtagaaataactgggcctaaacaaaaacaagggtgcccacttctctcaggctcccaaaagcccagcccagcgcaacaccccgccctcgcggcctcgccagtcgccacggccaccatgccgccgccgccgccgtcgaagaaccgcggccacgttcccgcgccccggccgcctccgggcaagccgcctgggcgacggatggcgagccgggacgcggcggagcgggcggcgttcttcgcgcggcgcgaggcggccgcggtgctccgccgcgtgctccgcggggacgcgtccaggcgcgccgcgggctccatcaagtcgctcgtgtactccccctccgtccgcaacaagcgcgccaccttcgccctcgtctgccagaccctcaagtgtaagcctcactcgcatcgatgccccccctcgtttcgctgttgcgtgcaaggtgttcgatggaatgccagtgccgagctgtgttgctgcgtcctctcaacttggatttggatatcctattactgccatcctatgtgtcgcatgaaatggtcgtgtgggaatgagtgccaggtgtttgtgccagttttcttctcgtttgtccatactgcacaatgcaagaggttattttctggaaacattaaagacaacttcactacctagcctccagagttgctctgatatggataatacatcttggtaatcagcatcacaaataacattttagcatcactcacagaactttggtggtaaaaatgccaactgttagataaccccatacacactgtttttcctagatttggatggtaattgagagctggggagtaaaacctcagtttggtatactgtacacttaaaaaataatctgctatactgtacacttagaaaatacctcagtttggtcctttttctgtattcactcctctcctcatgttgctctatttcctttatcagatcttccaattctaaaggaggttttagcatcaactggagtactaaccagtaaatggaaggtcagttagacacttcgtatgttgtgatggaataatggaattgaattccttctttgtgtacagtattgttatctgtgtggtgttcacatgttagctttagtcatgcctcttaagttgcaacatagaatacctgcatggtgcaaaacatcaactgactttttttttcaacttgcagaaacaggaagaattagttttcgtgactgcctatgacattctctttggtcaggtttgtcagttactcaaccctttagattcaacatattacttccacagtctgtgcatttgttttgtttaacctttcagttgtggagttcagatcttgtagccacaaaatggttaaacttttgcattgcacttgattacataacagttctgcatgtcattgaagctcacaagatagttcatttctcctgtccctattaaaataaacaataacatgaaatgatattgatacttgtaggagacagcagcttctggatccgttgaacagttaattatgttacataaggatactattatggctgctcttgagaaaatgtgtattagaaggaaggttcgtagtgttgaagacttagtaagcaagaaaaggacaggtacttctctccgctctgttcttttgaagcttttcattcattattcctgttatatgatatgattacttctaaatgcttctctcagccatctaattagcctgcccttccaaaatcaaatgcattagtcgatgtttaaattttttgtagcagttaaaagaagtgctagtctgtaatgaagcatgtaattacactgtataattagaatgtgctacaaacttacacttgcatttgcagagcatctcagttcaattttgtcaatactcaatatacattgttcatgtaatgtttcatataataggtagcttatgagttcatttccttttgtccatgtacagttgatttgttatgacaattgacatattatggccagctctgtttaacctgttggttttatttttagcaataccatcacagataatagttaatagcaccagtcgcatttgcacccggaaaaaccgacttggttttcaaaattaggatcataacaatgtttgaaaataagtgtattaattgaatttgtgcatatgttttggtttctacatattaattacatatggtcctcactaagcttaaatcatatgctaatagaggaattgtattcatacaagctactcactgttatccctttcttcagtcaaaccaaaacccaggtttcttcgtgttaacacactcaggaccagtacagattctgtcatcgaagaactgaacaaaatacacaaggtacttcatccatcttcatgtttagcaagcctgttgctgtaaggaacagtctaagcaattcttccggaaactactgctgtaaatgcaaccttattttcaaattgtactacttgtgagactcgactaatttcattcagtattgagtaggttgataaagacgaattggttccggacttgttggtgctcccacctggaactgatttgcataaccaccatttggtctcagaaggaaaagtatttttacaagtgaagtcttgtatttctatagcgtttactcttgaatgacctatgaataataccgattgcctttttcctcatctttaactcctttcacaggggaaagcaagttgtatggtggcagttgcattatgccctgagccaggctggaaggttagtgcattcgatctggctggactaaaatttcattaatatttattattatcttgaaactatttgcagccaaagatctacagccctaaaaggaaggcagcatatgttcttgatagatgctaagtagcagtagtaaactagtttattaccctgcctttcctgtatgcttgcttaattaaatgatggatatgactttacataaataagattttaatatcatctgaattacagtactacctatgttagtgcgtagcaataaatactccattgattttgattattctatggcatgagtttttggtaatgctgaaattgctggtatgaattgagcatacaaaataatactagtagctatgtgtttacttaaaatctatatactatttctcactttgcaaataaataagtctatatgcttttttttttgttttcatcttttgtttttgtcatggatttggaaaaaaaattgtagcatcacaatatttccagtcaaacaacattactttgattgtattgctttttagttacatcatattaaatcattaatttccacttgaacattaaacttaggttattgatgcatgtgcggctccagggaataaaacagtccatcttgctgcactcatgaatggagaggggagtattacagcttgtgaacttaataaagagaggaccaagactttgcaaaatactatccgaagatccggagcaaacagtatcctctctttaagtttctggttttaatgaccttgatagtgtatttttgcacattgttttgctgttaacacatccttctcaccatacttttagtttaaactagatcaatttattttttcaagtttgcatagtttctgctgtaactaaaatatccaatgatccttttggaccttcagtataagcttgttctgaaggaatttctagatatgctacttaagttgatgattaaaacattccgcctcccttagattggggtgttaatttctttgtagaaaacatactataacctcctgcttgcatcttaactttaatacgttttctcgatatgatcataaattgtcttgatgatatgtagtttgttcttctgtttcccaagttctatgtctgtttgtacttatttactatacattgtctgttatgtcttacaaagttcatgacatattatgaaactcattttccttgaccaattgattagatattgaaacaatcaatggtgactttttggatatcgatagcaatgatccatcatatgccgaggtttgtaggagttattgataaatattttagacgtcttgtagccttttgcttgcctcatagcacagctgtccctaattttgtgtgttcctatgagatgatgattgctgcaggtccgagctattctattagatccctcttgctctggttccggaatctctacagagagacttgaccatttgctcccttcgcactcaagaggtaactacaggttgataacttgtatattcataccctgtccaattaaaaacttttttgcatgatttgcgatgagcttagtatttactgtgtgcaatgtatgagtttgccacgatgatatgcatcctatccttgcattcatggaatttttgagggaaacatttgcactgaatgaaatcttgatacgcaggtaatcaggatgatgcaagtacgagttcaaggataaggaaactctccgccttccagaggaaagcgctctcacatgctctgtcatgtaagtccctcctctttttctgtatccaatcttaacatgtcaatggacatcatctgcacaattctgaagcttccctccacctcttgcccagtcccctctgtggagagagtggtctacagcacctgctcaatccaccaagctgagaacgaggacgtcgtgagctccgtcctgccattggcgtcatcgctcggattcgagctcgctactccattccctcaatggcgacgccgtggtctccccgtctttgaaggatgtaggtgttctatacctcaaatttcaaccatgatcagtcctggatgacaatccattgacgagtaaaaaaaaaaaaaacctctagttcttcatggctttggctttgcgcttgtgtgcagctgagcatctgcttcggacggacccggaggacggcctggagggcttcttcatatcgttgttcgtgaggaaagcagcagcagcagccgatgctgtaaagcctagcaatggtggtttgggagtgagcaagcaggtttttaagagacgtaacgggctcatggctttcggctcatcgagactgtccaggatgatgatgctctgctctacccggggtctctcgagaagatgatcctttaggatctcttcgatcttctttctttgaaagctaaggaaactgagtgttcaactggaaaattttgttttgaaatgcttagacgaggaatttttctttttctttttttggtttttgtagacgcaatgacatttaagggcaaatttcattccatttcacggctaccaagccacacaaaatacataagcagataactaataccacacacttattcactgattacttgatcagacgatcactaactagctcaaaagaagaacacaaacattccaggaccatcatgatgatggcagcgacgcacggttcgcctacttgcccttgcccttgggctcgccggcgccggcgaccttgacctcgacgacgcgcggcttcttgggctccggtggcggcttcttgtcgacggtgacggtgagcaccccgtccttgtactcggcgcggacgccgtcgaggtcggcgctctccggcagcgggaacctcctcatgaacttgcccatccgccgctccatcctcaggtacttcaccccctcgccgccgtcgtcgccgtcgccggcggggcgcctgcgctcgccgctgatggcgagcacgttgccgtcctcgacctcgacccggacgtcggcgggggcgacgccgggcatgtcgacggcgagcacgagcgcgccggaggcccggagctccttgacgtccatgggggtgttggccatggcgcggcggtcgcgcacgtaggcgcgcgtcggcgggttgagctgccgctccagctcatcggggaggtccaggtccagcagctgctgcatcgccaccgccagcaacggctcgccgccgaccaccgacaactccatcgataacaaaaactactttgcttggtggatataatggtgatgatctctctctctctcgtcgtgtgtgggtgcttgcgcgatcgtcgcgttctttgttgggacttgggagagatggagggggggagcttggagtttatatggagggagaggagtgaagagtgtggaagggttggggattacagggaggacgcctgtgcaacaaggtttccgttttgaggctgcctggctcagagctggggattacagggaggtggtggaatcagcatgggcacggggcagtgatggctcacagtctctgcagggcacctggagaaatatgcaacagatggctgcatctcttcgtgactggagcaaagtgtcttttggctcgatccgcaaagaaatacagagattggagaggaagctaaaaacactccggtcttcaggtttggaggagagtgtgatacaagaagaaaggatggtagaaaggcagttgtgtgagctctttgagagagaagaaatcatggctcgacaaaggtcacgagtggactggctccgagaaggagaccgtaacactgctttctttcatgctagggccacggcacggcggcgcaccaacaagatcactgtgctggtaaaggatgacggcactagatgcactgatcaggagggtataaaaaaattggccggaaagttctatgaggatctcttcacatctgaaccttgtgtgtcaactgatgtggtgttagaggcaatcccaatcaaagttgatgtgctggtcaatgaggaactgggcaaaccatactctgatgatgagatcaaagatgcgctgttccaaatgggcccaaccaaagcaccggggccggatggccggaaagttctatgaggatctcttcacatctgaacccactggggactgatcaaaggggagatttgcaatgcagtgcgtggtttccttttgggagaggagatcccggaaggtttttgtgattctgtcattgtcctaattcccaaggtacacaaccctgaacatctctccaaattccgcccaattagtttgtgcaatgtgctctacaaaattgcttcgaaggtcttagcaaaccgtctcaaactcttccttcctgatattgtctccgagttccaaagcgcctttgtgccggggagacttatcactgacagttctcttgtggcctatgaatgtttaaacaccattaagaaacaaagcaacaagaagcctttctttgctctaaagatcgacatgatgaaggcttatgataggattgagtggtcttatctccatggctgcctgatgagacttggttttgaacaggactggatcaatacggtgatgcgctgcgtgacctcgacaagatatgcaatccggattaatggtgagctcaccgacactgttgttccctcgaggggaataaggcagggcgatcccataagcccctacctcttcctactctgtactgaggggctctcttgcatgctgcagaagaaggaacaacaaggatttctacatgggattaggaatggcaggcaaggacctccaatctcccacttgctcttcgcagatgacagcattttctttcctagaagtgatcacagaagtgtccaggctatcaaatccacactgcaagcctattgtgatgcctcgggacagaaaattaacatgcaaaaatcctccattttctttggaaaaagatgtccaagcaacatccggaatgaagtaaaggcaaagttgcaagtgtcaacggaaatcctacaagattcctaccttggaatgcctactgaaatcagcagggcagtttcaaactccttccaatttctccctggcagaatttggaaaagagtcaatggttggacagacatgcctctctcaagggcgggtaaagaaaccatgctgaaatcagtggcacaggcgatacccgactttgtcatgagttgtttccgtatcccgatcatgacttgtgaaaagatgaagtcctatattgctgaccactggtggggttttgaagaggggaagaagaagatgcactggagattttgggagtggctgacctgtcacgcccagaaatttccgaatagaattcccaagcagaatgtgcattaaaacccccgtccaggaccggccgggtacacaaacgacaaagttgacatacagatccacgtcttacaaacattataaaagtcttacataaatgcagcggaaaaacaaaagataactggagctaagccttaacttgatctgtagcgggaacaccactccacaggcatcctcgacggcacggacgaagcctactcctcggagaaaccaccatcggacacatactcatactctggggttggggaaaatagagcaagactgagtactacccactgtactcagcaagtcataccggaataggggtatgatgcagggatttatcaaaggagagctagagtggttcatttgcctaaagcgagcatttataaacaaaagttgaaagaagtaaacagttgaaataattaatcaatattaatcatccactgtccaacgctatcccacgttgcaacaggcccagccatccacctaaactatccaatttcataagactaaactagggtgaaactaatcacggtgaatctggttgaccgcccataaccgcggggacggctattcgaatagttttactctgatcagaggtgtacaactgtacccacaagacacagccccacgacacgttaccgtgcgccgacatgccaccacgacataccggaaagaggccgtgacaggacccttcgcataaccccctctagccaagcacaccacacctcaggtttcacccccgtccccagcgggcgacgggcagtcccctctcgtgcctaggtgaatccggaagcgacagaggccgtcgcagggcccgccctgctccatcacacccacccttgcctggatgcgtcagctagaggaaagctacactacaagcccagccgttgcccacgctggcttgtggtaagcacgataaattcttccagggttttccgcgaaccggtccttaattgccatgggtgcgactagcaaaaccatgcacccacagcccaccatgtgattcattttaattaatcaacaccaaagtggtggtactaatccaacattaccattagaacctgcagtctatactttaataggatttttccccaatgtgtgctagttgaactaagcatggctaagcgattcctagtccaaagtctattcatgttataacccaagctaacaaggagcatggtaccaaaatagcatggctggaacaataggtaaacatcccatagtatttgttgcaaagcgatgcagtatttgaaagaaaacattagaacatttacaatataggatcaacatgatcaagtgacacgcatgacttgccttgctctgctgctggaagaacctcggcgactatctcgaagtacaccggagcgtcgggagaaccggaatctaagcgacatacaaagcaaacaatacaaacaggctataagactactgaaacagagaacaaaaccatttttaatggattctacacatttttcttgatttactgagacttgaacgggcttaaacggagcacggatgaattagttatgaattttagaagattcactgtgtttattactataacaaaagtccttaaatcatttattgcgcaataagccctagggctgacgtcatcaaggggggtggcgccgacaggcggggcccgcatgtcagtggcgcacggggtggccggtctaccgtggaccgggaccacgcgggtggtccaccgccggtccacgggatcgacggctcggatcggcctggggccgatcggacggtgcggcggcggcctggctcggctcggctcggcacaaagccggccggccggccatggcaagggcggcggtgcgcgcgcgtccaccggcgacggcaagcggcggcagcggacgacgccccgacggcggcgacgaccgaaggcgacggcgagcgcgggtggcggcggcgcacggggaaacggggaaggaaaggaaaggggagggagtcctcaccggagagggcggcgacgaccggcgacgaggagcgacggagggaggtcgacaagcggcggacggggtccgggacgacctaaagaacgaaaaggaaaagattagagagggagagaggggccatagaaggcgggaacaccggccgaaggcggcggacatggcggctctcaccgtcgcacggcgggaatggtgctccggcggcgaacctcgacggaggaggggtggacggggtggatctcggccactcgaacccaacggcggcgacggcgcggtgtggcggcgagcctagcggcggctagaggcggccggagtggcgggaaaggcggcggcgggtggatgcacggtgcgggagcgatggagagctcgggagagttcggcgagatggggaaaaagagagagggggtggcggtggagcttaaataggggaaggggaactcggacgtggccggtaggggcgggattcgccggccgacgtggggagttgggaaggagagagaggcgggattcgaaattcgaatcccggccatctcgggcgcgggcgcgagcgggagagagggggaagtgggtgcgggagacgcggcgcatgaccggggcggccgacgtggcccggagggggcgggacgtgggcacggcggcggtttcggcggtggtggcgacgtgggggcgggcggccggaggaaggggacgaccccgacaggtggggcccacctgtcagcgtcccagggagagaggggaggcggcttgggccggcccacaaggaggagggcgtgcgcggcggcggggtggactgggccgacggcccaagaagaggaaaaggagggaaaagaaaaagaaaaggaggaaaagattttccctgggttttaaaattgcatgtgctcaattttaattggttaaaattatttcgagagctctgaaaattccactaaaaatcttgttagcgaatttcgacatgtagaactcaagaaaaattccacatgccaattccgattattatttgcattaatttattaaggtttactcttgctttaaactggtattttcttgagaccatttataacttcaatttaggcttgggaaagaacttcagggtgtgacatgacctctccaaagtcattgggagggatgggtttcagggatttcgtcatcttcaaccaagcgatgttgagcaaacaaggatggcgcctcctcactgatccaaactccctttgcacaagggtacttaaaggcaggtattttcctaattgttctttttgggatgccccccaaccaagatctgcttctttcacttggcgaagcattctgtttggtaaggaattactcaagaaaggagtggcatggagggtgggagatggaaaatcaatcaagatcctgtcagacaattggattcctaatgtgcaggctggactggtaagtcctcttatgcatattccggaggatgcaacagtgcaatttctcatggaggaaggggggaaagaatggaaccacgacttggtgaaatatgcttttgatgaagaaactgccaatgagattctgcaagtgccaataagccgacatgggggggatgatttcgcttcttggccacatgacaagagaggtctgtttacagtgaggtcggcttacaacttggctcggtcagaagcctttcttatcgaccacaacagcagtggagaagaggcctcccctctatcatgcatgacaatgaaacaaactggaagaatctttggaagatctgtgcacctggaaagatgaaaattaatctatggcgtgctgcccatgactgcctcccgacaggttttcagctccgaaggaggcatattgaggcgagggatggttgtgctttttgcagcagagatgatcgcattgagcacgtgtttcttatgtgccctttctctgattctgtatggaaagagatcaagcaggtgtacaacatcaagctgggcagaggagatcttgctaatgtgagatagtggatttttgacttccttcgccgaggttcagctatccagaacacagtgcttgctgtcaccttttggcatatttgggaggcaagaaacaatgccaaaaataatgtggagactttgcatccgagaagggtggtccagaagatagtggcgtatgtggaaatgatcatgcaacactgcgggcctgggaatgtttctaggccggcggaacgcatttcattgcctagctgggtgccaccaccggcgggcgttttcctaatcaatactgatgcagcggtgttccaggctgagcgccaaatgggagtcggggtggtgatcagagaccaacacggcaactgtcttttggcggccaacactcgtttcatggggatcaccgatccggagacagcggaggcttgtgctatccggcatgcgctgtggctggccaaagaagaaggcttccataatgtgattgttgcttgcgactgtctttctgttattcaaaagctaaactcacctgggcgggatcgctccaagattggttgcctggttgaggacatcaagaagcttggtgttgagtttatcagtgtttcctttatccatgttagtcattgttctaatgtagcggcacacacattagctcgttgttctgagccctctgtctgtaatgtttaccataatgagactccggactgtatccgtgagatgctcctgtctgatgctcagtaatcaataaagtgccgttttcatctcaaaaaaaaaagagtggaagggttgggtggtgaggttgcgagagagatggagaatgttcgagcgtttctcgggagggggaagaggcttcggcactctttgctgggtggggtccactgtccacgcagcggcagcaggcattccggtgcatggaaacaaaaggtccgttttaccaagaattttgcaaaatgtcccaaaaaaaagaattttgcaaaatgcttacccttgtttggcagtccaataagcccttacttggaccctcccctccgggaccgagatgaaggagaattctcacccgtggatgagcagaggtggagcttcataattttccggggactaggctggggatggtaaattacccatgggtgactcgacaagacccttgactattagttatatgtttaaaagtagtccactcaaaaaaatataggtccaatatatataaaacctaaccttaatacacagccctctccctcacccaatccccagatcctcctcaaccattccactgtcgttatctctagttcccaatccccatccgaccatccccaaccgtcggttgcacctccccatcttgttagcctcctcgttgtgtgccccgtcgtcgccacctgccttgttacgtgcccgcgccccctcgtcgttggcgtcctcatcactggtcatctcgttgccgcccgccttgtcgtacgcccatgtcgtcaaccgcctcactgcacaccccctcgttgccagactcctcatcgtcatccaccccctcatcactggccgtctcgtcaccatccgcctcctcttctctggccaccctgttgagcgcccctcatcgttgggtcgcctcatcgtcatgccgcgtcgccgctcctccatcatgccacctcgtcgacgcaccatgcgttgccttgtcggttgccctcgagctgactcttagtcgggttgcggggccacgaggggccgggggcaaggactaatttcgctccggtaatccctccagggttgggggtagggataccagaggatagcaggggcgggggtgttccaacccaacccaccttggtcccattccgttgccacccttaggaatcaagaccaagaggtcaaaagctccatcgattggccatgagctaattataatccaaaacggcttattaatgaagaaaaataatttatagatcaaatttttatatttgtatttttagcgacgtaaacaatgctaaaaagaaacaacataaaaacataatctaaaattaactccaaaaattaagttatataattcaaaatttgttagtagcgatttcatagagggcaaacaatgagagttgaaattggaatcacagaaatatctctactacgataaaaggacagtcgtcctcccttcccttctttccttccacaatcctcattgcgcacctcttccctttgccaatctcaacatagcgcgcgagcgcactaatggaagttgagaaagaggagctcgtaggaacaaaatggttggcgagcactcaaaaagggaaggctaaaggtgagaagtgaaaccacaagtgagaagtgatcaagaaggaagaaaaatggatagagagaggaagaggaattctatatctatacattttatatagttggtacccactagaaattattagaagctaaatctcaacatgcaagtatactatataatcgcccactagtcattattattataaagcatcttaaatcacatgtaagcatgatatatcatatctatatatcctatatagtttgcaccaaaaactaaacatgcattagccacatcacccacaaaactagagccaccggatcattttcatgagccatcacaaccatccaatagacattaaatatcaacagttatcatttttcattgattatgagtaaactcaacattctttaaccacttagcatagtatgcagtaaaacaccactacaataagtatttcatttttcatatgtgaggtgtttttataggtacatagtatttatcacgtctatacattgaaattttttagctgcactacacacatgaatagtttgccgcaacacgcggggtattatctagtataagtaattattaaaagctaaaactcaacatacaagtataccacatcatcacatcatcacccactagccattaccatatatcattttaaaatacatgcaagtaatgtatcatataaaatataatattatagagtttaacatataagtatgttaaatcatatttatcacatcatttttacaatatttaacactcatcatttctataatatttaccatgtatgcatccatttattttgtagcaaaagccgggtatcatctagtatcaataaagtttatccccattaagtgtagttaaatactaattttgtattctctcatgaaaccacatcgcctcaattatttttagtcattggaagattcatcaaggatgcaaattgcatcccttctccacaaaaccacaccgtacaactcaatcatttattatttttggataattaatgaaatacaaaaggtataaacacatgaaggaaaatcatatagtaagttataattttttttacaatttatatatactattttacaacataattctctcgcatcaatgtatggaattaccatctattagagcatgtttggcacagctccagcttcagctccatctctcttagagctggagctcagccaaacagttttagctccacttaaaatgggagtagagctctctcacaaaatgaactagagaggtgaagctaggtttaggcagatccacaactctactccaaacccaactcttggagctaaatttaagagtttgagctctaccaaatatgcctttaatgtagtgaatgataggtggggcctactatatctcttgcatttttctttttcccttttgctaaatctatttaaaagtttaagggtgaacaggtatggttaacttatattcttttcgacgtacatctagttgttacctcactaaggaggctatcagacggcttattggagaataagtcaaacggcatatttacaaatgaaaaataattcacgaataaaatttttatatatgtattcttaaggatctaaaagcaaatgctgaaaaatcaactccaaatttaaggttgaaattttaaattttggctggtaagtataagtggaaagataagccttaaatcttgtgcaccaacttaattagatccatattataaattattttacagaatcgtttaattctgggtgtttgtgttaaaatatcaattattgaagaacaatgcatgttacgacaacactgtgacaacctataccgaatcaaataacctctctttgttactaatctaaaaaaccccgatttttttacatctaaacacacgcaacaccgtatttccaaatacaagcacgccaaacacacatttaactttgtaggcactaggcaggatgctacttgagtggtgatttctattgaactgttatgagcaaaactaattggatgctgaattgatgagtactacatacgtatacgtatacaccaacagcttacctccaattggcccgttggcttttgtttcagaaatcagaacaacatggccctgtattttctccagcaaaagttggattaaattttagatactcgtggcatgcttttcaaactgctaaacggtatgttttgtgcgaaaactttctatataaaagttgttcaaaaataccagattaatctatttttcaagtttgaaataattaaaaatcaattaatcacacgttattacaacctcgttttacgtgaaacacttaatcttcatctttatctttatcttcaggatattcaaacaccaccatagtacgtgtaacattttttctacaattcaaatctaattcatccataaggatcatcaaaattaatcataatttgtgctaattagtaatcttcatttgttttgcatactagttttgcatatcaatcagctttcaatcgtaacatatacatttttgagtgtaatctaaatatagtaaggcacatgattgcttttggttggcaaagaagagagtattttttttaagaaggcgaaggagagttatcaaggctgatgattcctgcacgttacagcgaaaagcactttaatctcttggacatttagttaaacaaacaactcatttgttttgaccaacatcaggtcaaccggatcgacgtggtcacgtaggcatgttgcttagaaacaaaaattcaaaaattatgtactcaaattcgtaattaaaaggttgcatgtgcttaaataccaaaaaaaaaagaggaaaaaaacccaaaagtaaaaaaaaaaacagcagagataatcgtattcgtgcccaagccgtacggccaacgaactgatgcacgaatcttaaagcaacgaaaccccactataatactccccatctccccgaaaacccccttccaaaaaaccgcaaaatctcaccgaatctttcgccgtctccgaggcttgcacaactcttcttcctcatcttccgccgcgggcggcgacggcggcggcggcggccatggcggcggcggagcagagcgcggagcagttcaggggccaggcgaggctcccggggttcgcggcgccccggcggtacgacctgcggctcgtccccgacctcgacgggtgcgccttcacgggatctgtggacgtctccgtcgacgtcacggcgcccaccaggttcctcgtgctcaacgccgccgagctcgaggtctcccccgggggcgtccagttcaagccccatggcgccgagcaggtagatatagattcgctttggtttctccctggcgctttgggtggtggccggccgtgggttcgatctactcgcgtgagggtggggggtttgggcgtgacaggtatatgttgttttcggtggattaagggtttgatctctcgagtcgaaaaattagggggaagttgacatttacttcagttatcggaacttgttagggcttatgtttttttttctactaaaaatgtctttggatatttcgatctttttatagcctttattgtaggcctcatgatcttgcatcctaagggttttagatttagatagggggtcgttgccgcagttgaaagtgtcaggaaatcgggatgtgatttaattatttagaatactcataataagtagaaggcctgtgcttgtaatagttagcttcaatttaaggtttgtgtttccatatctttaatttggtaggttgaggttagagccaaaataatgatggctaggaagtagcgatctttatttttttgggccgaggatggttttgcaaataatatcctagcattttgttatgtattttcttcataaggatcgttttatcttttgcattaggagctgcacccagcggaggttaccaatgtgccagaggatgagatcctgattatccgcttcaatgaggttcttcctgtaggggagggaactttagtaattgcattcaagggaactctgaacgacaagatgcatggcttctacagaaggtactcattttgtggtgaaaaggtttacttgtaaatattttgtctcatgtacataaactctgtaaatatcttttattaaatcttaatatactgtgggggcctctcctccctggtttaaaaaagtttatttgtaaattaataaatatatatatgtaatgtattgtgttgtctctagtgtgtatgaactcaatggggagaagaagaacatggcggtaacccagtttgaacctgctgacgcaaggcgttgttttccttgttgggatgagccctcttttaaggtctacacttccttgcctttttttttgactcctggtatctcaagctagtactatatgtgttatttttatttctgcttcatggggaataagtgttttgggccatgcatggtgcttacgttcaatctcactcagtgtgatgtctagttgaggacaaaacaaattatgtccctaaatggacatattgtgccacgtgggcttcagttcttcttgttatcgcttcatggagtccatggaattttttttggtgctatctcatttgttatccccaagtttgatggttaggatttaaattcgttagggttagttatgtattttcacttttttttttaccttccatagctttggatgatataaactgaacagtcactccacatgttcgattcatccttaaactctagggtatagactgattacatgttgcctgatttcatctttatatatgagttatgagtagacgagtgtctagtgcccattggatataatgatatagagcagggcatgcattgtttgattttgttgctcattttctgaacctatgccatatttgttttccttctggaatcaaaataggtctagaataacatctgcagttcatcctttaccataccaaagaaaactacatcctgactctctgcaccaactggttaaaagtgcatatgaagaggagttaaatattaagggactttaggttaaacagaaaatataatgtgggtttaatctctccttcttcgttacaggctatattcaaaattactctagaagttccgtctgagaccgttgcattgtcaaacatgccagtggttgaagagaaggtcaatggccttatcaaagctgtctattttcaagaaacaccaataatgtcaacatacctagtggctgttattgttggcatgttcgactatgtggaagctttcaccactgatggtactgtaactctttcattatctcactatcacacctattttagctttcacctttttgtggctcatgtcttgaatttaattggccttgtctttattttactttcaggcactagggttcgtgtttacactcaagttggcaagagtgcccagggaaagtttgcactagaggttgctgtgaagacactggtcctcttcaaggagtaattatctgttcctctgccttagtattgattatttgattagcagagttatcttgtgcagttatgctgctattacagtgctcattagacattgattatttttgataccagtagtattgctgaggaatttctggaacttgtcgttgccaaataaatgccattgaatgatacttatatagtctgcctctctctctctctctctctctctctctctctctctctacatatgcaaatctgcaaactttaacttctgcaggttgacagatatatttcattctattggaaaaccttttttctatatctattagagtcaaatcaaatattacattatgagctatttctggatgttatgagttttagaagaggcattcaaatgatgtatcatttcatagttatataatttgaggaactgttaagacttgagacatatgcatcaacccttaattgacttactgtcataaatgatccagctgatgacaattcctttatgttgctaggtattttgctgtgccatacccactcccaaaaatggacatgattgccattcctgattttgcctctggagcaatggagaactatggcttggttacatatcgtgaaacagctttgttatttgatgagaaacactctgcagctgcgaataagcaaagggtaggacactattttaattttattattttgattatttatgctaagattgcaatatgattcatggtcaccattacacatgatttatccacccaatttgatttatcagctaaacaaatgttgatctgatggtgtgaccagaaatttttcttatcagcaaattaataactggatagtacaccgatgggtcctttgagtcatcatttaaagatttaataatttctgatattcatatctgttttggttgtcatgtttaattgataccatccttctgtaagatacgtagctaatctcttattccactgttcaggttgcagttgtggtagcccatgaattagctcaccagtggtttggaaatcttgtgacgatggagtggtggacacacctatggcttaacgagggttttgcgacatgggtaagaacaaaacaatcaagagtacaaatatatagaaaatttacatttttatgttgctcatttgattttttccttttgcaggtctcctacttagctgcagacaatttctttcctgaatggaatgtttggacccaatttcttgaggaatctacaacaggtttcaagttagatgcccttgcagggtcacatccaattgaggtaatgtttgatatatagctgcatatttctaataataggtttgttttcatctaactgttttttcagtttcatttaagttttcttaaaaagcacttaaaaaattttactatacttttgatgccagtgttaccaagatctttcattgcaaacttacactaagacttacatcgcaaatttatgtatgctattttcaggtcgacgtaaatcacgttgatgaaatagatgaaatatttgatgctataagctacaggaaaggagctgctgttattcggatgctgcaaagctatcttggggctgaaacttttcaggtttgtgatgcatgtactagtgtgctgccccatgtagtgctacagttttcaaataaatacgtactgtaaattctaattttacaaaacaccaaacgactatcttcaaatctaaaactaaactggccaagtaggcatgtacatacatacatgtgtacatggtttaatatttaaaaagatcttacaaatgatacactctttgattatataaccacaggattagcataaactcactataactaccgctggtcctcttttaaattctagaccagagatgttccctttgttattttggaaaatacaaatggatggcagaatggtcgctttttatatttgtttttttaaagactgtttatcagcctgcataagctttttattaggaccttaatatttgcagtagtatgttacctgaggaattaactaggcgcagaattagttattactaataatattctttggaacacaagtttgcatgaggtttcattttttgcttctcattggaaataagaagtttgtttgttctttttgctagaaatctctggccgcatacatcgaaaagttcgcatattcaaatgccaagactgaggacttgtgggctgcccttgaagaggggtctggtgaaccagtgaaaacattaatgcattcatggacaaagcagcaagggtaccctgttgttaatgtgaagctcaaggatggaaagctagagatggagcaggtaagactttcctttcttttttcactataaggtggacttccttccctctatctaaccctttttgcatcctaaaaaaatattattgtttctatttggaggatttgtgattagcacctggtcttatctcttgcagacacagttcctatcaagcggggctgaaggagttgggcaatgggtggttcccatcacactgtgttgctgttcgtactcacgtcaagagaagttcctttttaatggaaagcaagaggattttaatttgtcagggcttgtagaatgtcaaaagaaagaagacttctggattaaacttaatgtcaatcagactggcttctatagagtgagctatgatgaggaacttgcatctcgacttagatatgcaattgaagccaacaaactgagtgcagcagacagatatggtaaagttcttacagaagcatcttataagtggatgttaccctgcccaactgttcttacaatattattgtttggtacaggtgtacttgatgacacatatgccctctgtatggctggcaaacagaagctagtctccttattgcatttgattgctgcgtacaaggatgaaaccgagtatactgtgctcgcccgtgtcatagatgtatagatctttctacccgacaaatgtttttgttagattgattctgttctaagcatttcaattcttggcttgatagacaagtctgagcattgtcgagatggtggctgttgctgctcctgaggggttgggcaagctgaaaaagttcctgattgactttcttgagccatttgcacagtaagttctgtatgatgccattccatagtggaagaatattttgttctacaacctcctaaacattcaggaatcctttgcaggagaattggttgggatgctaaaagcggtgagggtcacttggatgcattattgagaggtacacttttaactgctctggcagaacttggccatgaagctacaataaatgaagctgtacgccgatttaacatctttgtggaagatagagaaacaccactactccctccagatgttcgaaaggttagcattgtaatttactgcacattatgttggggttatttgttaattttatatctcattaacaggaatagtgttatttgttaattttatatctcattaatgaagttgagtttgttcatgaaactttgtagggttgtttatttacatattacctacatgtgtgattctttttgagattttttgaaaattttataaaaaagtttccaagtttctgcctaagatgtggtttccaccatgtatttttcccatttgtatagctatgtaactatgcgaactatctgcactcagatcttctttttaaccatcttcctgttttgtaggcggcatatgttgctttgatgcagacagtgaacaaatcaaacagagccggctatgaatcactattgaagatctataaagaaactgatctgagccaggaaaaagtcagaattttaggttagtcaaatatgcatttaatatttattttgacataggtgacattgtctgtctgaagttgggacttgggaccttttataagttctgttcctccttatgtaggttctctagcatcttgccctgatcctgatgttgttcgtgatacactggacttcatgctgtcacctgaggtaaatacgggaatcagtaaacaccttcacattctacatgatacagccaaaactttatctcatgtgataagcataactcacaacattttatgaatgaacaggtgaggaatcaggactctatatttttgcttagaggagtcggtgcagcgggacatgaggtggcatggacatggttgaaggtgcttacaaatatgttattttcctcgattcgcctttctacttcctgtttcttctactgacaccatgcttctttatggttcaggaaaagtgggactacatttcagacaccttctctggaactcttctcacctatttcgtttccaccaccgtctcaccggtacacagtacaccttattttcaacgtgctcacatacacatgccattatcgttacattgtaaattttcctgactcggtgtcgaaaattgttccagctgcgcaccgatgaaatgggcgacgacgcggaggagttcttcaagagcaggacgaaggccaacatcgcgaggacggtgaagcagagcatcgagagagtgaggatcaatgccaaatgggtggagagcaccagggccgaggctaacctgggcaatgtcctcaaggaaatttctcacgaccactgagacgaccgatcttttcctgcgccgttgtcttagcgtgtaagatgcgtactctccagcaacaagttagtaataagaacttggtgggttagacgacctgttgcatgcccctgatacttgcatctatggaccagtttctccaggttatgtcagtttgatagatgcaattgcaatttgcatggagtatttgatagggacatccggacatgaattgcatgcaaatgttgccctggcagttcaacattgccagaatctgggaaattaatgagcatctttcgtacacaatcgagcattcttacgtcaaatattagggctacgaggccctgactgcaaatataaaaaagatactccctccatcccataataatttcacttctaatattttaaatctatgccataaaaaggcgtatttttaggttatggtttattagaggtcgatctcattgaattcacgcgtatagtccaatgggaaaacaaatttatccgtgtcattggtaaaagtgtactttgttggactgatggagtatgataagtattatgaaagatattagccgttactaaattatatccagcaacaataatgattctacttcatccgtttcaaaatgtggctatttatagcacagtttcgtgttccaaaataaaactatttctccatctatctcctcatctcaaccaatcataaccattcttttccacctattttctcttttcaatcaatcacacatttcctctaatactcgtgccaatcttaaaaatgtctacattttaggacgaaggaagtactccttccgtctcattttaaatgcaactgtaagttttcgcacataattttgatcatttgtcttatttgaaattctttttataattaatatttttgttgtttatgagatgataaaacatgaatagtactttactcgtgacttatggtatttttttcaattttttttaaataagacgtacgattaaagttggacgcggaaaaccatagatgcacttaaaattggacggagtaagtatttttttttagcatcctactccctagctaactagtactagaactagtactactactcagggcaagtgctatggtagatgtgactaccatctctaaatttatctattttattcacccatgaactaagagacaacccatacaatcaatgcatcacctgtagtacacaaataccaatatctctgatactttcacatctttcttaaaatttgtgtggaggttaccacttaatttagggtgatatttaactatttgcttatagtacttgccctcagttcttgaatattagctacctctattctaaaatacaaatatggaagttttataaaatattagctatctctatcccaaaataaagaatatagtgacttgttagtttgttatatttttccattgtaatgtactacctccgtctcaaaataagtgtagccgtggaaatccgtgtccaacatttaactatttgttttatttaaaaaatttataaaaaggttttaaaaaatagtcacataaagtattattcatattttatcgtctagggcctatttagattgtagccaaaataaaccttaccaaattttgacaagatgacaatattgctaaaattttagcatgatttcttatgtatttactaaatttggcaacaaactaaacgtatatattttatttaactttataaaaaaagatggtatgattgaaaatgacatgtaagtgaacatgcctctaataacaataaaaataataatcataaaaaaaaattaaataagacgggacggagggtgtatgagctacttctatcccaaatacagagacggaggacggggagaggcgagcaacgagcgggcggcgacgggggacgacggggcggagagaggaggaggaggcgacggcgcagaggattctccggcgccgcccgccctcccgcacgctcgcagctcgcagctcgtggcgccgtcctccccccgtcgctgcccgccgcccgccgctataccatcccattcttgccgcccgggaagacactcagcccaatcccatgcgcctgtacagttgtgcgggaggagcaagggccaagagcacggcacctgcccctcggcatcggacacgctggcctcctcactgctctctccttcttgtgcttgtgcaggcaggaggtgattgaacaaaaccgcaaccgcccccttgtgctcttctactgattttgcttctgcacttgtttgtttcagtcttgattttggtgatgtacaatatactatgcctatgaccctcattgcagtctgtatataataggataagatgcacaaatcagaacaggatggttttattttttttagtacaggatttagaatttataactgtaaatgttctgaagccagatttcatcaaaatggtaggaatatattattggtcctcttgattgtcagcctcttgtaagttgcgacttgccttttctagtgtataaacttttttagcactccttatagcatgttctgaacaatccctctattaacgatctcttgtttttatgaacatgtttggagcccttgttatataattcttgatttctgtaatctctgagtttcttagtaaatttatgttcaggcggaggctatgtccaattactcccttttgtgtgaatactattgggctaggcccccagaagctgggtgtatttttaagaggattgtatggtgagtagataagggccagttaaaattatgttctccttgttgttcaaaggtatttgtgttttttaaatctgatcttcaacgtttctgcataggctacatttgctgcaagctagagagagctattgtgcgtcggattgggagctcacatgccatcaggaaactagatttctgtttaacttgtgtcccatggttagataaatgcatgcgccaagtttagtaatgacaaagtgcttccatcttgctaaaaatagtgaaataaaattaatcgaaaaactttggcactgcctacccaaactgactctttaatttgatcttggtacatgagttcaattttggtgccaacaaattgacttgtttttccatgaacccatgcatttaattgatgatacttacaagttgtcattttacgagtgagaattgtttgaacaggtatgataatcataggaggtcccatcaaagaaaagtttttttttttcgaatgtggtatttacattctgttgcaacacacaagtacttggctagtcatagaagcaaaccaaaagttttctctggcgatgacaaagatgcgcaaaacatgatctgagaaccaaaggctgctcatcacccacttggcatcttgggcatgtcacattacatacagaaatgcattgccttaatctttcctttacatggtttaattttctcctcttaatcatctacatgctaatgattaatcacccaaactatgttgcgccattaagtaacatcatcagctcagctgcagtccacacagagcgaaggcagcagcagcagtgccttttaatcatctatacattgcagctgcaggtgcagcagccatggaggatggaggcagcagagactctgatcatggcgtggagacgtcgtcgccgccgaagctgtagggagcggagctggagcaggtggtgctggtgctgctgaccttggaggcgtcgtactcctggctgaggcagcgcagccggttgagctccggcaagatctccttcccgaggtccggccggtccttcttcctcagctcggcgcaccgcagcgccagcttggcgaacaccaaggcctcctccaccggccagtcggtcaccatcgggtcgagcacctcctggaaggtccccctctcgatggcgctctcgacgtggtgggtgagccccatgggcgacctcgccgtgatgatctgcagcagcaggatccccagcgagtagatgtcggacatggtggtcagcatcccggtctgctggtactccgggtcgatgtagcagaaggtgcccgccgtcgaggtcatccggtactgcgtggcctcggcggcggcagcggactgcgggacgaggcgggcgaggccgacgtcgctgatcttgctgacgaagttgtggtcgaggaggatgttggccggcttcaggtcgcggtggaccagcggctcgggcttcgcctggtggaggaagaggaggccggtggcgatgtcggcggcgatgcggaaccggatgttccaggggatcggcagcgtcttcccccgccggcacagccggtcctccaggctgccgtagtccatgtactcgtacaccaggcacccgtactccgggcatgctcccagcagcagcaccatgtttggatgcctcatgcagctaagcacttctatctgaacaacaaaataaataaattacaacttattcatcaccatgcagtttattaattactccctctgtttcagattatgagtcgttttgactttggttaaagtcaaactgttgtaagtttgactaatttattagtctataattagttctattaaatctataattgaatatatttttataatatatttgtcttgggttgaaaatattattattaattttctgtaaatttggtcaaacttgaagcagtttgactttgaccaaagtcaaaacgacttataatatgaaacggagggagtaattagcttgatcatgacatgactatcttttgcataattgacatcatatatttgatctgcccaaaaaaaagaagaagaaactctcactacatgcagtttatgagcttggttataactatcgtttgcataattgacatgcagataatttagatatttgaatggtaaatatgggtaggaagataaaatgtcttcaaaaacatatgattgaaataatgatgttctgaactaactcattgtcagatcattaaatccttcaaaaacaaaaaagagaaaatttgcttcctgatggtgagagaaaatattgcattcagttttagtttggttgtactaatatgttaactcaaaacaaccctgaatatactgaaaagatgaagaatttactagatactcctatattagatttacctcttgctgaaactgtttcctcccttgtgatgcatctggccttaagattttaatggcgacattagtatgatccatgacagctttatacaccggcccatatccaccttcccctatcttgagtgccttgtcaaacttatgggtggcagcttcaatgtcatcaatggaatacctcctgtaccttaaatcagtgttgttcattgcttctgttgctctcttcctctcctcggcttcgcgcttcgccttccactctgctctcagtctcttctgagcctccagctctgcaattctctgtgcagcctctgctgcttccagtgcggctctgcactttgccttctccatttggaccagagcaagggcttcctcttcagcattcctgagttcttggtacttcttggactcttccatcttcatctggtgcatctgagcagcctgctgatttgatcattattcactattgtttcaaaatatttcagataatagttgaaatttacagcgacatagaagtgggcagaccttctgtttagcatcaattgcttccttgcatgcggagttgtacatttccattgtctgcttcagctctagtctcagccgtctcatttccgtttcgacatccttctgaatttcaaacgacacaaaaataagagttgatcaaagtccaatactctaaaagattccagatcaccaagattttgatcaactgcagcaaaactgatgttgccggtgtgcttgcttaccccagctgagcttaggctttcgatggacattgatgcggaaagcgaaagctccaaagaatcgccgaagtccatcgatggcaactccaagctcaaaggaaaatcaacatcatctgaaaaggagctacgggttaccgagggccttggaggagctatgaagtcgatatagtcgtcgaaatcctttgggggtgctgatctagctccagagagaggcctttccctggttggagcttttgcaaagccagatagtcggtccaccgatggtctgtttgcctttggagatgattgattggaaatcttcttccagtctcctcttgatctgttcagcaaacccggaacatgatttcgtattatgttagcaagttcagaaggtaaaccgagtgacatgactgataaacatatctatatctacttatttgcatacaggtgtttagattttagaatctgattacttcaaaccattttgcaatgtaattattgagtgaagcgattattccttatcgacaaacttacctcggatatccatcagattctatgcttgactgtgagtactgtttgggagggagagtggtaaagggtgctggggctttggctgccttgacttggattgccttccctttgtggatgacatgcactgtgcagtaatcaggcaccatcttcatcaagcatgttggcacatcaggatttctgaactttctgcaggacacgaggttcatgactgtgttcagttattacaggttatcaagggattggggaatggtgcacagcacagccatggaggaatgaacagtcatgcacctgatgaatgtgttcctcgtcgacgccccgacgacgatgtcggtgatggcgttgctagtggcatactcgactattgctttggagatgtcactgccatccaagatcacttccttcaattgcatctgcagtttgcaatgtaagtatttcttgagcttattttgttccatttgattttgttattgtcatcttattctagtagtgaaaaaaaaacatgtatctgataagatagtagtatatatattggggcaattatatattctattggcactcacccctttacgagcacaatagcctctgtatgagatgaacatctgttgcatctctgcatccgctcctgcttcagctgcagcatgaagaaatttgttgatgaaattaaataaaccagggtaaattggagaaaaatacataaattagctaccggaatctaacaaactatatgcagaattttgaaagaatgcgtattatcgacaaaatcatgcccattttgtcgtgtctgaattttccatcttcctacaaacttccattgcatgatggcaaaatgcgtaatattagctaacccatgaaatccaaacaactacatgcatttcaaataaaatgtgcattgtcgacaaaatcatgcccattttgttgtctctgaattcttcatcttcctgcaaactttcactgcatgatggcacaatgcaaaccatgcacattctcttccacatccaattattgcatctctccaattcgaccaagaaaaaaagtagtgtttttttcctctcactgatatctcttgcattgcaagattagctttggttcatgcagattcatggagcattaccattttgctgtggcttgacatggacgagctggagaacgctgcccctggcgaggagccggtccaccgcccacttgaccgcctgctggctgttcttgtcccggtcgacggcgaccaccgtggagctgtccctggcctcgctgtccccgccgccgtgcgaagacgccgaggaggagaaggccgacaggtacatgctccccgcacctcgccggcaaaaagatcgtcggagtcggagaaggagaggaagagacaaaaaaaaaaaaaaggattcttttgcttctcctcctctccctcttcttccctcttcttccctctcctccggttttttgatcaagccaaccaaaaactgcaggaggtttcgctgtttttttttcttcattttttttggggccaaatttaggtgctgcagcgttgttaatggccgttggcttacttatgtttttgtggctcttgtgtccccacttgtcattgactgcaggtgttgctctctgatctatttttgcatgtccttgtgtgcatcctagttgaaacacggatgatatatacagtcttgcattttttttaaaagggagtgtagtttacaatgtacaaaacccctacaaatttgataaatcatactacgtaattttgatctaaaaaaccataatggttttttttcctttgtcagaaagactggtctgaacttgaaaaatgtaactatgaaatgccacttaccccttctttttataaagctaatacccactaaacacttaaaactcaatatgtaagcataatatttattagcacttgtaaaacctatatgcaagcataatatttattagcacttgtaaaacctatatgcaagaatgccacatcgacccattaaacacaaaaagctcaacatgtaaacatatagtaattgtatctataatttattttcattctaaaactaaacatacacatgctaaatcatcattctcaaatcattctcatattattttaatccaaatcatttcatcatttctccaatatgtaacatatatcccgcaacaaaacatggggcatcatcaccatttgtttcatatatggaggtaattttcagggcaacatattggctctggttttgggcacagttacaaaggtctgatgaagacgaagatcttttaaaagttgcatgcaataaacttgagtcgatggttatgcagttttttttgccaatcatgaatgaagattcataaataggctttaataatatgttctccatatcttttattggttatttttatctttatttactggttgctattatttttggactatacttgttttgagtgctagactgtaataataggctgtagctcttttgaataaaggccgggatgttatattccattatcaaatctagttataacctttcaatacattacctactagaaggcggcaaaaattatttcttggtacctctcaagaggaccgtatataaaatttctctttcatagtacgtacttgctaatatacatgatgattttttagtaatttcgtgggtacggaactaatttcgatgtgaaacatactgtaaaaattcgtgtgttgcaagtgttaaaagaacttttaaaacagtagataactgagagctgataaatatattttaccgataaatctattacaagactagtatctactttaatagttccttactcactaggtttcaaaattcttaaatccagcattgacatcgacttgccttgcaagttgcaacggatattaaaaatataccttgcattgacataatttggaagcatacatgaaaattatgtctttttgcacacaaatatatatttatctaacatactctcagattaattgttatattttaaaccggagagagtcataaaattggattggacacttagtgatactaccaaatacacaacatataaagagataatgggactgcctatagaatatgtgatagaaaacgctcttcgaaatcatgcaaattttggaccgtccgattgtgtgtcttccccgtctccagtagctccctactgtcggacccgccacctcctaaccaatcctcctgcctccccctcccccctctccccccaaaaccaccaccaccgccctagtaccacccctcttctaaccctgcaactttggtggcaccattgtagcctcgttgctcgccgatccaccgcccatcaccagctaccgtctctcatgatcatcactcttaagcccaactttccccctcttccccttccaccctgacctcaacccgagatcctaatctataggtccctaccgaagtttaagatgctaccgatgccagagaagatgggaagatcaccgagctaatggaaaatgatagaaatatgaatcacaaagtacattagatagctaaaatttataagatttgaaggtagatttcataccaaataattcttagcaatcccgataaattaaccacaagaagtagtcaaaaccgctctaacctcaccatacacttgtcaaaactcaaaaccctcctctgtgagactgacactgcgggcccactctcttccaccaaagcccatcgttatactagtgagctgagcgagctcctccccgactcccgagacgcccgcgcgcaaccaacgaatttcccgcgtcgccttgaaccacctcgcgatcgccgcctccgcctccgcctcgatacccatggcctccggcgagcctcgcccgccgtcacccgccgccgtcgccgtcgccgtccgccccggtggcagcgcgagccgccgcgccgcgcggtgggccgccgccaacctcgtccccgctggagacggagacggccgcgcctccgccgccgccatttccgtcgtccacgtcatccccccgctccggttcgtcccctccccatgtaagtccgcgcgcgcgcctcgcctcttcctcggctagctaggtagcggatttggttgattcgggatgccatggcttgacgcggggttttttgcttttgcgcgcggcgtcgtgtggggcggtggggaaggcggggagcaggtgccggcggcgcgggtggcgcgggaggcggcggaggcgtacgcccgggaccgccacgcccgcgcgcaggaggcgctccgccccttccgccgcatcttcgccgccgccgccaatgcgacggtgagtttcccccaatcctccaaaaaaaaaaaaaagaaaaatccccatctctgaacgtttcccgtgatctgatccggtcgcgtcgcgtaggtggagacggtggtgctggagggcgacggcgtggcggaggcgctggtccggtacgcggcggattccggcgtacggagcctggtgatcggctccgcctccttagggtggttcagaaggtgcgtgtcctttttcttcccctccttttcagcattgaattttgttaacctatgatgagattattaggggtattgtaattatgttctcaagaggtgattaagtgaaaagggcgtctcgtttgctattaatttcacctttttagtcgagggttggaacacggaacaatggcttcattagaaattaaagtgcattttgatggggattagttgcaagcctcaagtcacattgcttgtgtatggttgcactgtgcgtgtgtactatgcagcatgtgtgtaagtgtgttacagtatgtgttgctgacaatttggtaagctgctgctttctgcttatgatgatgggaaacagtcgtccaggtgtcttcaattgcattacagatggctgatagaaatgttttgtcttgtccttttcgatgtctagacattataatgtgacattgcattagtcctttcatacaaatgttttcttgcaaaattcactgaagatgtagatagaccttgtcaccggttggctcctgcaaacttttctgaaaaaaattagtaaggttggttggtaatttatttatttgatgtcggtgtaccaggttgtcagtttaaatttcatggacagctagtttctgtttgataaaagcctgatgcctaatgcaacaatccaatttaaacccagcaccagcagtacttaggtttttgtcaaaatgatttgggacatcaagctatacttttctatgctaaattcatttatagatcttagctttccgattatggctgcaataaaaatctgcattattgtactgccctcagttttctctggattcagaaacttccttcttcatgtacagattgtaaataaatctgtcatacttgcttcaaggttgcttgatgtttctatttatatttaataatttatttttattatgctatcatctttatcaagaaagttttgattcgcataactgcttttgccatcaggacttaaaaataaagtctttagcactgttatgttttctgtccttaaattgctgcaccgtccatttttcagggcaatgagtgtcccagatgttgccactgcggtcctaaaaacaacggaaatttcatgcaatgtatttgtcgtgtccaaacgaagactgacactgaaagtgacgaggcatcctcaaatgagcagtatgtcttgagttttgacaatgtgttttcctctttgtcctatgttttatcttgtttcatgtttctctttgctagtttacatatttcaaagctccgtttgtgttaaggcactccttttgtagggtctggtactggcttgagaattcagtcagttagtcagaaagcatttgcacaatcgtacagaagtttgttgttcgacaacttccctgagaatgggatacacccagattcatgctgtcagtcccgtgtttctcattgtggtcctactaatgcacgtcaaagttcagaaagtcatgggcaaatcctctttaacagtttaggtgcaaagacaacaggaatagaaggatataaaaaccatggtcttcgaagccccttcaaggaagcacattatgctgactctaactcaagtgaagaggtcagatctgtcccctcctttcttaaattttcttgtactattattcagtgttgctgtcaagagaaactaatttgagacatatttgctttcgtatcatgctaaacatgttaccctgacattatctacagtgtcaatccatagatgaagtagcaaaactgaggaaggaattgcaggataccttagtgatgtatgacaaagcctgtgaagatcttgtccatgctaagaaaaaggttaagttcttaatacaacttaagctatcttcaaaagttattatctttgtttggtcatgctttccctgttggttgtaaatcttgtacgcaagtagtcagctactagttaaattatgtttttgtgcattgtctgttgcacatgagctctgaagtttggacgctgtgtgcgtacttggtcgtggcgagaatagctcgcggcttggggatgtcaatgcctcgtgcggatcatggggctggatgtgatcaaaccacgacgtgggaagcgctcgacgctttctgttttgcatgttgcttgttccattttccagaataaaaaggagaagagaaaaccctgaatagctgcagcttgatcgcagcacaaaacctttcatgttatagttcttgctcatttcgttcaaaaaaaatagttcttgctcattcttgtgttctagctcgagttaggatacaagagtttgtgaggaagaagaattataacacaagaggatttgtgctgcgatgaagctatagcttttcggggtttttcccttcttctgttgacaaaaatttaacatgcaattcccacttaatttcggaaatttccgaaattgagtaatttcggaccccccgggaagtcaatatctcggccggaacttttgttttttctcattttttttttgtgaatttagtcaaattcagttaaattgtgtcaaaatttcagaaaatttcggcccaaaaaatgctgaaaattcagttctaccaaaatggctgaaattttagctgaaaccaaaattgaaagagatttgctccggtttagcaaaaaatacctcgaggtaccggtacctcacgttacaaatcttttccgatcgttgcatctagctgggcaggttcggcattgttacatccaacgatcagaaacaatttggtatcgtgaggtaccggtacctcgaagtactttttgctggaccatagaaaatctcaaattgaaaaccctgtttacaaccaacaaaactccacataaaccttgtccacctgcttgatttcgacgaggccaatcttggatcgtagctcaatgaacttgtcgtacccaagtgcctttgttaggatgtccactagctgctcattggagctgatgaactcgaccttcaccttggcctcttcaatgcattctctgatgtagtagtatctagtatcaatatgtttactgcgatcatagaaaacatggttcttagtgagattatggattggttgtcaatattcaatgtgatggcaccagcctcctctcctctaagcttagcgagaaggcgcaccaaccacacaccgtggcaagtggcagtcatgtcagtgatgtattcagcttcgcaagacgaaaacaccacatcttttttctatgattgccaggtgatgaatcatgtcagtcatgttgccaaggaagaagaagacgccataggttcctttgttagtgtatgtttggatggtgctctgacctgagcgctctcactcaggcaggtgcatctaaccacaggccattaaaatcggacgcctaagaatcatgcctgactcaggtgtgattctcagggggtgaaccaaacaggcgggtgtgaaccaaacagggcttgagaatccccgcaagatcgctgtcgctgtatcagacaagatgcactgcttcgatcttcctccagtaatggcagccgtagttggtggggcctgcgacgtatctccagtggcgaagccatcgtgggggccagggagggcctggcacctcccatgccgccatgcgacaaccccaccctcccccccaaaggtgattatcccgtataatctgatcattagttactaatgagactaactatatcgctgcctaggttttagcttaaattgttacgtgggttaactaactgaagttatatgtggttgcaaacctcaaattaaaatgatgaaatgacgtgatgttgaatcatccatatactaaatatattactgtatttaaaatagatgctatttgatgatctaatttaaaattagtgaaagtccatatattagtagacatatacgtctaaaaccacatcaacaatcataatttccataattatataaggagcgattagacatatcatacgtaattgcgcatattaatataaacaagatacgattgggtatatctttctcttctagctaattgctatgatatgcatgatgctgaccacacattacactctacaacattgtccatcgagccgcaagtgagctctctcatctcatagatggcacccccaatccctaaatcctggcttcgcccctgcgtatctcagcacacatttcatggccgccaggtgctggttgggcttgatgaagtccgtagtgcaccttcgaggacttgagctagaacaaaacaagaagaagattgccagggaaccttacaaaccctataatcttcctcttgaattctacattattgaccctcaaattattctatatctctgaatttttttaaagacatgttacattcatgttacctcaaatgcattgatccttgttatcatgatgattcaaatgcattgatccttgtcatcatgatgatgcagattcaggtactttccagtgagtgttctgaagaggcaaggaaggtggagcatgctctacaggaggaggaagctctaaagcaggtggtagcagacgagaaggcaaaacatttagaggccattgaagaagttgagcaagcaaagaaatcattcacccgggaggcctactctaggaacaaggcagaaatggtagcgagcatgatctccctcgataaggcaaaagttgttgatgctatcttgtcaacaagcaaaaattgcaggcgatacaaaaaacatgagatcgagctcgccactgataatttctctgaagcaaggaagattggtgagggaggttatgggaatgtgtataggtgcacccttgatcatactgaagttgctgtcaaggtcattcagcaagattccatcgacaagaccgatgagttcctgagggaggtaattatggtttatggaaaaatttatgcatatgcatgtagaattcaataatatggtttgtggcaaaattcatgcatatgcatgtagaattcaatgtacagtttttttatttgtgtctgagaatctcagtaaaatgattctactgtatggcttcatgcaggttgacattctcagccagcttcagcatcccaacctggttttgttgcttggcttctgccctgaaattggctgtcttgtatacgaatacttgcagaatggaagtctagaagatcaacttcttaacaacaaagggcgccagccgctgcattggttcctaaggttccaaatcatctttgatgtgtcatgcgggcttgcattcttgcatggaaggaaaccggaacctatagtccaccgtgacctcaaacccgcaaacatcttactgaacaagaattatgtgggtaaaattggcgatgccggtttcgcgaagctcatatcggatcttgtgcctgactggcaaacggagtacaaagagaccatcatcgccggcacgctgtactatatggatcctgagtaccagcaaaccgggacggttcgtccgaaatcggaccttttcggcctgggagttatcattcttcagatgctaaccggcaaacgccccaatgggctcattgtcagcgtagaaaacgccatcagaaacgggatgcttgctgatatccttgacaagtctcagactgattggccacttgttgaggcagaaatgttggcaaagcttggcttgagatgcactgccctaaaatgcagagagagacctggccttgagtcagaggttctccccaagctccaggaaattctgcataggattacttccactgttaacttaagaagtccaaagttaaatgtgccaagccacttcatctgccctataatgcaggtaaatccactgctacctgactgttattttcattcatcttcactatacattgctcgaaaagattacttttatacctcttaaatctgaataactataaaattattcttttaaagaagtcaattatacaaattttatacaggaggtaatgaatgatccttatgttgctgctgatgggcacacgtatgagcaacaagcaatcaaagcttggctcaagaaacacaaagtatccccggtcacacggcgaattctaccaaatttgtccgtaatcccaaaccattcgttgcgagctgcgatacagcagtggaagtcacaatctgctcatgcaaagtcataaaatgggcgtggagtttgtttcgatatgatttaacttttttgttctttgagttctttatccggagtttgtttcgatatgatttaacttttttgttctttgagttctttatcctgtaaattagagtgcagttaggatcttagggaggagggctgttgccggtaaataaaggtgttaaccgtgcaaactatttagtaccgaaattgaaaaaattgcagatatgatttgttcttataatatgagtaacatgtttctctttcagtttctgtgttgtctctcttcccttttatttgtaataatttggttagcttgaaatgtactcaaacaccttctgtcttaatacaaagaggtattcgtgagtaaaaaaagtagcatatttctctctggggatttttcaataaagaaaacataccattttaaatggtcacatagtctttaaaatataattatgactgccaattttattgctcaataattgaaaaacctcagtaaaattataatattataaaggaatttttgaggaaaaaaatctatacatgtgatttttatacgtctaacctaaatatttaaaagagttaattgcactttggcacgcatattcttaccaagttttattttaaaaagatagttatgtccaaagtatttaaagtttaactttaagcatgtctaaaacgatgtgttgtttagcctaagggaacactaagttctattcctaaacaccctccatttttcctatccaaatctatatatattaaataaaatggtgaaatataccaacatctctcagcctgcatgcatgcatataatccagaattttttcaggactaaaatccctacccaacccgagcccaatgtgcggcacaaggcctactattttggattgtaactcaggccaccgatcttagctagttttacgtcaagaagagaaaaaacaagggaaaatcttgagccaaactttctccgcccagaccatgatcagctaatactggtgaggtaactgactaactgtgagacccgaccatgatcctgtgggtagatctagctgtaactccacatggtttttgtccatcgccaggaaattgtggtcctgtatataggttttacaattagtatttttattgttgttagatgataaaacatgattaatactttatgcctgacttgtttttttaatttttttcataattttttcaaataagacggacggtcaaacgttaaacacggaaatcaatggtttgtcttttttaggacggagggagtacataacatagaaacaaactactagtagctagaagctgaataatcccaacttttctatatcctcactagttgaatataatacccacttgtatctttacaatatgttagaagagagaattctttatataccattaaaaatttaccaattttcttatatgtcactcgaaattgactttttcgttatattccattgcctcaaattttcgtaccctgtcttgccactaccttgtgttgattatgtattgaccgttaactctatagtaaaaagacacatttgcctttctgagatttactaagtggttataatatgagaactatttgaaagttacaaagaaactggttgtaaaaaaatggccatataaaaaataaatatcgatgtaaaaatattttttattcagtatattaaaattatgtactggaaattcatgtggatagtatgtactgcaaatttgtatggtttctacagctttttttttaatccagtatatactgatctctcgttggaggtatgtactgcttcttcttttttttttacaattcggtatatactttatcacatgctcgcttttggaggtatatgtgtactgtttctttttttatgggttgtattcggtatatactagattactagtggtttttggcttgctacgtccatatatatccaagctcgtcctccacatgtagggatactaatctcgttaatatttaaatgaaagatataacagttttaaaagttaaaatatgtcaaaattttgtcttctatgttacggctaaaatataatgtgtttgaagatatatgtctattgaaagaagcattacaaatataacactattaaaaatatatacgtgtctatttttatataattttatataacatttattagttgctgcggacgaactcatttgccttacccgtgaactttggtccaacatccaagctttgctgcctccactgacgtgtgcaagcgcatgctgataagcatgcggacaagtgctgcgcagtcattggccatgcgtacgtctgccacgtgcgcgttcgttaatattcgttcttccagcttccccaagctagcaaaggcagagtttagttccaaattttctttaaaattataacttttccatcatatcaaaatttttctacacacataaactttcaactttttcgtcacatcgtttcaatttcgaccaaactttaaattttggcgtgaactaaacacacctaaagttaattggtgcagtacgacaatttggcaaactgatttcgtttcaaaacctaatatcatggtaggcacacataagtgaatgcatgcttagtcgccattaactagagaatgagaaaatggacaaagaaaaatagataatcacgcacacgtacataagttttatcattatatgaaagacgtgcatgcatatgcatcatatcacacgcaacgtaagtattatcattgttctccctccgtttcgaaatgtttgacaccgttgactttttagcacatgtttgactattcatcttattcaaaaacttttatgaaatatgtaaaattatatgcctacataaaaatatatttaacaatgaatcaaatgatagaaaaagaattaataattacttaaattttttgaataagacgaacggtaaaacatgtgctaaaaagtcaacggcgtcaaacatttcgaaacggagggagtatgaaatacgcgtatgcatatgcatcatatatatcacacacatgtactacaaagtcgtgaatatgtatttgtgaactatcagatttaaactttggtggatagagtagtacacacgttactacttctctgaatgcgtgcactctttaaccctttagcatgggtcatattattgcactttttttttgttactacgtgttcttgtagtttactgcaaggcgtcatgccgcaccactctctcaaaatgtcagtgctcaaatgtcactctcccaaattttcattctcaaatgctacccgggcccacatgtcagcctcactcatcatcgggtcccgcatcacttttgtttgaatggagagtgaggctgacatgtgggcccgggtggtatttgggaatgaaaatttgggagagtggcatttgagcactggcattttgagagagtggcaaatagtaaattccccctgatgtgaggatgttgcgttttgtagcttaattgttgccaggtcggggaatagcatggtattatccacagggggaaaaatgttgttaattaattagtacgtgttctcgttgtgaccatgcaattagctagtttttttctctttaattagctttgttgctaattattattcaaggttcaagtgtgatatcgatgaatctagtattcaacttacatggtgctacttgtcagttatatttgtcagcgctcgactaattctcttcttttcgcgttcctcgcgttcggttaatttcgccttccatttactattgactctcgcagaatcaacaggactgatatataggtacaattattttgcgtcttgattatgtacatgtaattccatccatttgaagaaattactgacaaactaaatttgtacgtaaaatcgtaatttttttacaaagtaagaagtaagtcaccttaatatgatctatggatcatcgtacctcaaatagtcaaattccacatgcagctagatgcatgaattccacggaaatgatgcatgatgttatcgtgcgatcgattgagactaattgagaccacatgcagtcttctctatgactgcaagataagaacatacgtggctacgtaccttttgttctttcctatagaaggtagaacacgtaagtcgagatgtaatttttttttccagcgtgctctaatcatatctgtgtgcccgaattttgtttggtgatattttttctcaagtgaaacaccttaatctctcagtaagacatagctgctaattaatcacttttgtgtggctcacgcatgcagccattgattgctaaacgggtggatgagatggaagcaacggcaaagtctgccgttgagaccaaaggcagacgatgcagaccccatatatacagtcttttcgttttaaagtataaggtattttaattagattgaacacattgatattatatatttagatttatagtgctagaagcttaggatgtgtcttatctgatcaaataatttttattttaggactgatggagtagtaatttttctatgtacttagatgtacttttgttcggatatagatttagaaattattatattttgaaatggaggtggtatttaatttataagctactcctccgtagtatttcggatgatcgatgcaaatatacatgctcgcgaacttaaatcacacagatatagcccatttaagtggctcatatcagctcattttaaatggaggtggatatatttttcaccctcagtgatattctctcttttttacaagtcatccaaaatttcatagttcttttaaaaattaacaagatatattaatatacgatatatcactctaaaaatatgcaaattcaaatttaatatataacatataaataataataaacttgaatgtgaaaaatgtgtattatttgcggccagatttattatttattatttctatatttataggttaaatttgaacttacatgtttgtgacgtgatacatatattgttctatcttattattttttagaaaatatttgatgatattttaggcgacatgaaaaacaaaaggatcaacatttccttaaaagacaaatagattcttctcacttaaaatgacgcgcgcgcgcgtgcacacatatatatagagagtacatgtttatagtcggaaccacatacaagttacattgggatttaaatataaacatgtgtatagtaagtgtatttaatttttacttgtacgtggctccaaccattcatcttattaaaaaattatataaatatgtaaaagtataagttaaaattatattttatttgatgataaaacaagtcataataaaataaatgatatttatataaaacttttaaataaagggaatgatcaaatgttatgaaaaaaatctacggcataatatattttgaaatgaacggagtactatttatatcccaccaaacgaacatcctctcgctcctcgaaccaacccaacacaacacttgcacttgcactacgtactctcatttcatccgctcccggccggcaatggcgccaccgccagtgaactccggcgacgccgccgccgccgccacgggagagaagagcaagctctcgccgtcgggcctccccatacgcgagatacccggcggctacggcgtgcccttcttctcgccgctgcgcgaccgcctcgactacttctacttccagggcgccgaggagtacttccgatcacgcgtcgcccgccacggcggcgccaccgtgctccgcgtcaacatgccgcccggccccttcatctccggcaacccccgcgtcgtcgccctcctcgacgcgcgcagcttccgcgtcctcctcgacgactccatggtggacaaggccgacacgctcgacggcacctacatgccgtcgcgcgcgctcttcggcggccaccgcccgctcgccttcctcgacgccgccgacccgcgccacgccaagatcaagcgcgtcgtgatgtcgctcgccgccgcgcggatgcaccacgtcgcgccggcgttccgcgccgcctttgccgccatgttcgacgccgtcgaggccggcctcggcgccgccgtcgagttcaacaagctcaacatgaggtacatgctcgacttcacctgcgccgcgctgttcggcggcgagccgccgagcaaggtggtcggcgacggcgccgtgacgaaggccatggcgtggctcgcgttccagctgcacccgatcgcgagcaaggtcgtcaagccatggccgctcgaggagctactcctgcacaccttctccctgccgccgttcctggtgcggcgtggctacgccgacctgaaggcgtacttcgccgacgccgccgcggccgtcctcgacgacgccgagaagagccacacgggaatcccgcgcgacgagctcctcgacaaccttgtgttcgtcgccattttcaacgccttcggcggcttcaagatcttcctgccacacatcgtcaagtggctcgcccgcgccggcccggagctccacgccaagcttgccaccgaggtccgcgccaccgtgcccaccggcgaggacgacggcatcaccctcgccgccgtcgagcggatgccgctggtgaagtcggtggtgtgggaggcgctgcgcatgaacccgccggtggagttccagtacggccacgcgcggcgcgacatggtggtcgagagccacgacgcggcgtacgaggtgcgcaagggggagatgctgttcggctaccagccgctcgccacccgcgacgagaaggtgttcgaccgcgccggcgagttcgtcgccgaccggttcgtcgccggcggcgccgccggcgaccggccgctgctggagcacgtggtgtggtcgaacgggccggagacgagggcgccatcggaggggaacaagcagtgccccgggaaggacatggtggtggcggtggggcggctgatggtggcggagctgttccggcggtacgacacgttcgccgccgacgtggtggaggcgccggtggagccggtggtgacgttcacgtcgctgacacgggcgtcgtcgggatagcacgcacgtcgacgtcacgtgcgcgccgtgctgtgatttagtactgtactaggttggtggatgttttaattgcgtggttaattattaatcacgcataaagtattaatcatgttttatcatctaacaacaatgaaaatattaatcataaaaaaatacatataagacgaacagtcaaacgttagaacgaaaaactagggtttgtctttttttttaggacggagggagtaggttggtggatgctttaattgcgtggttaattatttgcatggagttcttgatttgccgggggaccggggtggggtgaaagtgtttgaattcaacttttgattttatgtaaagtttgatgaattaatttgttacaaagggaaaataaataatgtatagatatgatactactgctagtctgctatggtggatatgtgagttgatttgtaatctgtctagtcttaaactaacactccctctatttcacaatatataacactgttgatttttctcataacaatgtagtagttcataggcacttgttaagggagattatggcatttgttcctcggtgtgaggaaccctgtgcacctcgagagtgggaaattccggtgggttatggcacccaccggaatatggaaattctcctctaggtgcatggaaatttttcctgtgagtaccatatctagggaaatatggatgggaggatttcttcatccatcgagagcaggaacgggttgctatgctacccaacagaggcagcccggttgccattcctaatccacgtgtccacatcccatgtatgtttgatgctttcggaggcgcatgcagagtggattgcatgttgtcgtgtgagtgaattttgtaagcgattgcatccaatggtactctcttaagaagaagaaataaaatcctataaaccgaaaaggcttgaaatttcccttattattgttcaaaagaactaaagaaggctggattttctggggttcatagatatggcttataatataggagtacgaaatttaagaggcccaaaaggaccaatgatgcccatgcgcagtagcctgagatgagcccagcccaatctctttaaagaatcgagcgagaggaagcttcgggtggaccagtttgtttctagggcccaaaaggaaagaacgttttcgcaatacaaatgcattcaaagcgtttcttaaaaaaaaaattacaaatgcatccacacgtattattcaccaggaaattaggttgaacaggtacggttttttttagagcgacaggtacgtcttttgattggtctggttttgtattcaactccccatgtttcacatgcatttgaattcataaaacagattagaccgggacaacacgctactaccatctaaccgatttttcatgtggttaaatcattttttgcaggcggatgggtggtccacctgcatgtattttcgattgcggacacttatgtcatccgactgtgaaaaaaaggcaaaaaaaagtaaatgttcctaaaattgaaaccctagccagatacgtcgccacctggtcgccgcagtccaaagcccgttggatccactcgggctgggcgcctaccgccgccagtcatcatcgcagcaaacagggcgtggtcgtggacatcattgccatcgagtcattgtcgctgtcgaggatcagagatgaagtgtgggagggggagaagggccgctgccaccattggatccacctcggttggggttgcggccgacgggtccgccactagatccacccagccggtgctgcggccgacggatttgccacctcctgtcgccgttgttgcttgatccgccccagcctgattcgtcgcctcctacagctgctggatttgcctagtcgccccccactccttcgctactgatgacagatcccacgctcgccggctgctctgctcacatgccctactggctaatttgctcccacgcccaccggctactccgctccgatggcggagtagagactggaaagcccgaccgccaccgccacccgcagtcactggtagtaggagaggagtgggcaacgaggagagtggggagagttgtggacgggagaagagaggattttgtgggagagagagagaggggagagaaaaaggagtgggaagagagatgggcattttcgcatgctatcctgtgcttagggaagcaatttttgcacgcgggagtagttatggtctatctacaatctgaaggtggtctcatcccgaaaaatcaactacgtagtagcgatattcttaattaaagagagagctagggttatcctttcataaaataaaaagtcatccaaatttcatgctttaatttcaaagacgacccaaagaccaagagcaagcacaaaaaatagcctataagctgactataattatttctttgcgcatgtacaggagagataaaacagattgacagctgttctccaagaattagctttgcacgtgccttaaaagagatgcattaaatatataagtgaggaaaaaaaagataatataataaaatagagatgaccttaatcgcttaattatttcacatgttagttgtaatatatactcccttgtcccaaattataatacctatattttttacacgttcttcaataacatactttgaccaatattttatttcattctatgatcccaataaacatgaaattaacatcatatatatgaaagtacttcaaaatatgaatctaatgatataacatgcataatgcatacttagtatagatatagtatgattattagtcaaaagataccgagtttgatttttcttaaaaagaggacgctctgtaatttgggacggagggaatactaattttagatgtgcttattatagttagtggttagctttatcattaaatttgctctcgccgcgataaaatctacgtgtataaacttaattcagtttcttaaaagataattatggagtttaaaaaaatggcctctccaggaatttggagccccgtgacgaaatgtaaattatggccctaaattttttaaaaattatagatataatataactaagcatattttatgtcaactatataactttaatgtgttatttcataccatattcaaaaaatacatcaaataaatattaatactaaaataaaagagagtaaaggtagtaccaacctcgtgatgtactgaaaagcatcatccatctattgtttttttgaaatgaaatatttgattatatcttcataattaatattgtccaatacatcactttcagcacctgaatcatacttcttatttgtagaagacatgccaatgattgaggaaataaaattcttctcgtgttttataaacaaaagaaaagacaagacattatattactttttggttgaataatcaatctaattggtcattcaaaataccataattttatttgaatgtatatgcatatgaatatatatccatccatcccagtcaatgaacagtgtgagaaaaatagtcgctgtaaacaattggcaacaaggataacagtgtgagaacatagttggatggattggcaggcacgtagatgaagctatacatggaaccatagaaatcacatgacttcagaaaagaaaagtatagctatgagtagatcgagatggccatgtcaatgataattcgagcctttgagggagattggattgaggattcgaggacgaggagatgaccatgaggacgacgactcgacgaggaggcagagccgcagaggccgcacagccagcccgccgccagcagccgctagggcttgggctgttcggtgctcgccttgccgccgctcgtcgctcgtcgctcatcacctgcggtgcctgctcatcgctcgatattatcgtcggtgagtcggtctgcttgcctgcgcgtcgatcgccgcctcgcgtcatcgtctcgtcgactcgtttgtctcgactctccatctcgtaggcgcatgcatcagttggaaattgaagtcacttcactggtcacaacgccacgatcgagcccacgacccacgcacgcaccgacgcaatgcaaagcgacgcctttcgccttctgcccctgcactcctcgctcggttggtaatggtagcaggccaggcatgtgtgcaggctgttgggatacgcgtaggctacgataggataaattaaaattttctatcgcgtaaatcaggaaccatgcaagtattagatcatagatcgttaccactcgacgcgctgcgcagaggaagaagacgctgagaagtcgaaagaactctcgcgaagtagtgcgcgtcgatgtagaggaagtagtcgatcgcaccggctcgaccttctcctccacgtgcgttctcctcgccatactcccacgccgatcagcaccgcaaaccagcggcgcctctaccggtatccacacgtacagggacggaacgccacgcgcagatgtgctagcacccgcgcgcggctagggttttgctcggagagggaagtgatggctagggtttctcacgtgatgcaatgcctccgtcggtcacgcccctcacgaatatataggatccatcactcgggcctccaaggcccgtaggactcctattcggatccctatccgaattaagctcatattggatctctatccaatccccttattccggctcattaagcgtacgaccctgtaggttcatatatactcggctgtaacccgaaaactccttttcggtccacgcgtcaacagcggcacctagcagaacgtattgacccaccgggcatacataaagatcatatcggctgaacctctagtgtatacttgtatgaacccctttgcctcacgatatcgattaagctcaaggctagatatgtgccatcctctagtagctcaatcattcactcgaacctgttgatagattatataacttgtgattgactcctcaatcacctttggcatggccatgcacttccataatctacaacatcgaggagccaagagatatctctccataggaggggcaaatcccatcttgcttattcatatcccactacatgtttcatagcatacccgaaaactacttttatagctacccatttacggagtagcgtttagcagtccctaagtaagctgctacacatgttgagaaccatgataatctcaggtctaagaattcaacaccaatactaaatgagatcaccgatgacacaacacatatggctcttgcagtgtctcatattgggtctatccaacaacatgttcaccaacatgtgtccacattattaatttggtatctctataccatgatccatgagacatgatcatcaattaatacatgtgctgatcatataaacatatttgttccacatatgatatttgatcagggatcctttagaaatagtaacaaacaatataaagagtctcatgaaagaatcacatattcattaaccaataaatagttatctatttcaaggaacaatgtcggataaatatataaatatagtatgtgatacaatcatctctatgttgcctctagggcatatcactaattaacacatgcctacttcgaggtgagggcaatggcgaagctatattgtgtttggagagtgcacatgaacccccaaattcctaatctcacttaaaaacactaaaaacactagagtgtatattgttgtattgaaattttctaggttttcaatagtagtgtacccctttgttttgatgctagcttggcccctgggtgagcgcccccaaaaaaatcgagggcccggcctgtgcagccgtcgtgttgctcatggctagctatcgacggccctgtgcagataaagaaaattattggtaataatagctagagtcaggccaatagggataatggtttcttgggttatgaatacaggccaatagggataatggcctgtgtcagatttagctcgaattaaaatactcccgcgtgatacttgcttaaatattaaaatcgtccacatagtcatcaattgatcaattcatcatcatatatagtcccatatgatgatctcgatcgtacgtgacgatactttgaactggtccacttgatcaacagccgatgaggtattcttccttatgtaaaagtacactatcgaagttacttagtactattactttgctacctctgcattaaaataatttcgttaacgcaccacgctcccagggaacgtttctaaactctcgagtgggcatcccctcgatctttgcattctatccaaatagttataaaaaaataaaaattttgataagatagattgatatgttatatataatttgactatggggtatttagatatagaggtgtaaagttttggcgtgtcacatcgggtattatatagggtgtcgcatgaggtgttttgacactaattaaaaaaactaattacaaaatccatcagtaaaccatgaatgtttactgtagcaccacattgtcaaatcatgaaattaggcttaaaagattcatctcgcaaattagtcacaatttgtataattaattattttttagtctatgtttaatactttatgtaggtgttcaacgttcgatgcgacgggtgtaaaatttttatgtgggaactaatcagggcctatatgtatatgttaactagctagagttccatttatcccttttgttataacttgtagaagttgaacttgtacgtatttaaagtgattaaatcacatattaatctatcctcttaatatttttataactatttagatgacatgttacaatcaatggaaatataagacatttaccaaaggtactcacaatttatgttagatttacatattatctatttgatcaaataatgttgtgcaataattgactcgtattttcctttccagagatgctatcatagcttaagaatacatctggtaaatagatgaactacaaggctaatgtaatattatttcaagaccttcctcaactatttttgaaggttaccacgtcatcttgaaccctcaacatgtagatattcaaacccagtgagtttttagcccagttcggcctcttaggacaacatttactacaaacagacctagcgcctttatgctaactctgttagttaattttggacttataggagagcttatggagtcacatttcaaagcatatcatccacgataaacttcatcctgagtcaacggaaatcatccaaacaagattgcactgttgttgaaaccaaacttaagttttagactttgtaatagactaggcctatctcgaaaatgcctctgtcgatctccacaaacctaaacacattcctagagctattttcctctttaaatatctatgtacaccctataaaacaattggatattgtttagctaaattttgccaagtgccattcactatgtagtcctcggttgtttagtcgctttactatagattcagagcctccaataattggtgtgttgatttgccgagtcgattagataaaacacttccaatgttttctttgttcttaattacctattcataatatttagattgcaaagatcatcaagcacgcatcatcatttgtggtacagtgattgtacgacatcctgaacttgttctgacgtcaccaatatcgcattcatcaaagctagagttatccctcaccaaagaaacaaaccacaagagagagcgccattagatatcccatcgaccgtttaaaatttattccttcacagtccatgataagaacaagcagttggtactcccttcagttttttttttaaaaaaattcttggttgtagttgacttctaaacatatatttaccattcatcttattaaaaaattaattaaataatattatttatttcgtagggattgttttatcgttagaaatactttaaatataacttatattttataaattttaatatatttttaataaaccaaacggtatgataaaaatcaatagcgtcaaaatattacaagtaggatactaccatcaatgctcagtcagcaacagacacacaatgaaaaaaaaaggaaaagagtttactttgtctgcttctcactttagcctatttaaccccagtacaacagatgctcaatgattcatagctgtggctgtgacgatccgacacctgcacgctagtacgtagtgcgtatacgtagccagtaccctactcccgtccatggcgccgccgcgagccaactccggcgacggtaacgacggcgccgtcggagggcagagcaagctctcgccgtcgggcctgctgatacgcgagattccgggcggctacggcgtgcccttcctctcgccgctgcgcgaccgcctcgactactattacttccagggcgccgacgagttcttccgctcacgcgtcgcccgccacggcggcgccaccgtgctccgcgtcaacatgccgcccggccccttcctcgccggcgacccccgcgtcgtcgccctcctcgacgcgcgcagcttccgcgtcctcctcgacgactccatggtggacaaggccgacacgctcgacggcaccttcatgccgtcgctcgcgctcttcggcggccaccgcccgctcgccttcctcgacgccgccgaccctcgccacgccaagatcaagcgcgtcgtgatgtcgctcgccgcggcgaggatgcaccacgtcgcgccggcgttccgcgccgccttcgccgccatgttcgacgaggtcgacgccggcctcgtcgccggcggccccgtcgagttcaacaagctcaacatgcggtacatgctcgacttcacctgcgccgcgctgttcggcggcgcgccgccgagcaaggccatgggcgacgctgccgtgacgaaggcggtgaagtggctcatcttccagcttcacccgctcgccagcaaggtcgtcaagccgtggccgctggaggacctcctcctccacaccttccgcctgccgccgttcctggtgcgccgcgagtacggcgagatcacggcgtacttcgccgccgccgccgcggccatcctcgacgacgccgagaagaaccacccgggaatcccgcgcgacgagctcctccacaacctcgtgttcgtcgccgtcttcaacgcctacggcggcttcaagatcttcctgccacacatcgtcaagtggctcgcccgcgccggcccggagctccacgccaagctagcctccgaggtccgcgccgccgcgcccgccggcggcggcgagatcaccatctccgccgtggagaaggagatgccgctggtgaagtcggtggtgtgggaggcgctgcgcatgaacccgccggtggagttccagtacgggcgcgcgcggcgcgacatggtcgtcgagagccacgacgcggcgtacgaggtccgcaagggggagctgctgttcgggtaccagccgctcgccacccgcgacgagaaggtgttcgaccgcgccggcgagttcgtccccgaccggttcgtctccggcgccggaagcgccgcccggccgctgctggagcacgtggtgtggtcgaacgggccggagaccgggacgccatcggaggggaacaagcagtgccccgggaaggacatggtggtggcggtggggcggctgatggtggcggggctgttccggcggtacgacacgttcgccgccgacgtggaggagctgccgcttgagccggtggtcacgttcacgtcgctgacccgcgccgccgacggcgacggcgccgcgcggcgcggagtataatagtgtcaagcggcggcgcgcgtgagcggcgagtgttggtgcggcgacgacgctgtccatgcatggtcgctgtcagttggtcagatttgcatggatttcttttttctttgacctaaaaaaattgggaaaaaggtgtactttcgcgtgcttgtgggggcaggttcttaagtatagggattcggtttgtcattgtgtgaagttcaatacgatgtttgaagttgaataaaattatgtgcgttcctcgtggtttttctttttggattataggtcaagatggataatcacacaatgcaaattatgtgcattcctggtttttctttttttggattataggacaagatggataatcacacacgctaccatgcaaattatgtgcattcctcatggtttttctttttattataagtcaatatggataatcacacacgctaccaatcatgcagtggaaaccgcatatgtattggaaaatttaaatttacctttgattcaaaaatagatgtatgatatttattcatatcatcaaaagtagaaaaatttcttctagtaaaattcttactcatgattgaatccgggagttttcaaatttacactacatatttcccccgctaaagctacctagcttgtgaataacaacttctaaggctgagtttgacagttcgtttatcaactcgaaatgataactttattatttctcgttagcacgcattcggaaccgctaaacaatatattttgtgtaaaatgtttctatacataatttatttaaaatttataatagttaatatgtaattagtgcaactgtgcaactctgttttttaattgaccggcaggggatataccactctcatgactttctctgagaaggatggccacgaaccctggctccttgacacgcagatccaccccatgatttaggctttaaccctttgctttgaggcacttactcgtacacgatggttcgtaattataagtcatttcttaacacgtgttttaaacaaggggttagcgagtacatttttaaaaccagctcaaaaattatctctcaagatgtgtcgaacctaagggctggtaggcatactataatatcataaccactgtgcaacaaacccgttcactaccacctacactttaggttacaaggtttttattaagtaggagtacaatcgaacaaacacaacccacaaactttagtactccctccgtttcacaacgtaagtcattttaatatttcccacattcatattgatgcgcatcaatataaatatgggagatgttagaatgacttacgttgtgaaacggaggaagtaccactctatcatcggtagatcatatcgaattcctgccataataaacctctagtgacgatattaattaattaatatcactgcaggtcaagccacaaactggcatttgtacatatgatgcagtaatattgtattacatatatattttgttatgtatgtccctatggacgattacattacgatcatttgatctattcgtgatctgtactaatgtattatatatgtatctcgcatttaacctagcttgtcgaagagatggatatgcatggacttcaagcctccacattgagcatgtcgagttttttttcccttacatgccactcaaggcaaagcataattaggtgacaattaatgagtacaacttgtacgacttacaatagaaaaccctataatgacacatccaatataatggatcagtagctgttagtaacttgtcctaaagaacattcttatgttaaacgccacttgtttatgtagaaatataatccaagtcatttggggccgcatgaccgagtcatgtctcatgcacatgtgctaagtcgttgaccatgcttttgtgtgtctggtgcacatgcgagtacagagcttttactaagctgaattatagattttttttttgagatgatgtgcactgtagtgttgtataatgtacatgttgcttgattatattagcttaggcttaagtcacatatggattaattattggttgcttggtcagatatatggattgcaacacctaaatatatggaaggtatccctactttttgttattaattttttagtgaattaagtgcacgagcggtcactaaacttatgtaggtatatcatccaggttccttaactctcaaaatgcatattttaggtcccccaaacttatttttggtgttatataggttcaaacgagttataacccgctctatgatgtggcatgtcatgatagggcctacgtgctagtcggatccacgtgtcagttacatatacaaaaataaaactaaataaatattttatcctataccttagaataatttttatctatcttttttttcttctctacctatgaggagaaaatatggttttaaattttattttttataaatgaccgacatgtgggtcctactaacacgtaggcaccatggcaataccacatcagcgcatagagcgggttagaatacatttggacctatgcgacactcaagataagtttgaggataaaaaaatatattttgggagttcaaggacctagatgacacacccgtagatttttcgtagagtaacttttggacgagtacagtaacttttggttgtatatactaatgtcttgatatatagttattagttttttatatttttacacagtgtaagggcatatacaaatgtatactctgacaattaatgtaccaaaatagttgagacaaacaaaatttcctaccattactgtaccaaaatatttttttactacccttctttccttttctccaccccatgtaacaaaacttcttttaataaaagagtcgactctggaccgttatcatgcgtagcaatcatgtttccctttcctccccctctctctctctctactatgtcattaattttagagaaaagtacattttacccccctgaactaatgcggttagccgaaaaacccccccgaacttaaaaatcggtcatttttccccctcaactaataaaaccggacacttaaccccccctaaccatactttgggcggttttgactggagacttgcgcacgtggcagtccaacgtggcaagacgggcgcggttgggcaagcagcgactggcgcagctcaggtagggcagcgggcgcggtagggagggcgaactggttggcggcgagcggtgacgggcgcggatgggtgcctctggtcggctcacccctctctctctcttttctctggaggcggagacggagcgcgtcgaccgcacggcctccgacctcgcccgccgccgtcatcgaccccctcctctacgtgtcgccgtcccctcccccaatctccatcgcaccatccccacctccccaacggcgacccaaccgtggccggagccgaggcagctgctcctatcaggttccagtcgaggcggacgaggagcgacggcgaggccgcccccagccgcctccgaccccgcccgtctccggcctcgcctccacgccccccagccgcggcctcgacgcccgccgctggcctcgcctccgcgcccgccgccaccagccgcctccgacctcgcgcgccacccctagccgcctccgcctccgccaccagctgccccgacgagctcctccgctgccggccgcccgctccgcctccacctcagccgcccagggagctccgccggccgcccactccgcctccgactaagtcgcccgccgccgccgccagcgcctgagcaacttttcttgcccccgcccttgcccgcccgccgccagtgagggaagggagaagagagagagagagagggagagattaggatagagagggagagagagagagagagagcggacacccgggtgagctccgcctccaccgcccgccgcgcgggcgagcaccgccttggccgccggccgtccgagtgcgtgcgcctcctcctccgtagccggccgccgcaaccggccgtccgaacgagtgccgcccgcagccgcctcgtcccccgcgccggcctcggctcctcacccgccgcccgcagccgcctccgcacccgcctccgcacccgcccaccggcctcggctcctccgccacccccttcgtcgcctcgagctctgccagagaagagagaggacaccgtccttaaggtgagggagagagaagagagatgattttggagagagatagagaggtgaggggtaaaagataggtgagagactgacacgtgggacccactgatttaaaaagaaaagaattgctgactgggctgccacgtagaccaaaaccgcttgcaaaactgctcaggggggtttttcatccggtatcgatagttgagggtgaaaaatgaccggttttcgagttcgggggggggggggggttttcagccaaccgcattagttcggggggggggggtaaaatgtacttttctcttaattttacttgcatagtaacgaaaagagaccgttattactcaccgttgtacatgccctaagtattttgtatcacatccaaacttggcaatgaatggccgacactatgtcgtctgtttaatgagacttacaccctctaaagtcggaacaggaagagcgactcatttgaacaatttttaaaaggagtgactaaatttcgccaatctcataagtgtgcagtacacactaaaaaaatctaattagtgtgattatactctagtggtgatctaattagcgtgattgaatcgtggtgaatgtaactcccaagtacaattgtggaccatgaatgaacatgacaataatacgaaaataacatagtgatattgaaagggaaaccaagcagtacgttgcatctagtaattaaccctaaaagactgccctataaaccctaaaaaagataaatcatatatatgaaatgcaaccctaattaaattatccataattcctttccttgtttcatagatcagatgatccatgcttgagctcatgggctattagccgctccttcttaactgtcctcttcttctccagcgagttcttgatcatctcctgcttcttctccttcttctcatccatggcgccgccgccgccgccacggccgccgttcaactccttcacaatgcgggtgtccttcatcaggctccgcttcgacctcgccgccgacagcttcccggtgacctcgtcgtcgtcgatgacgaacacctggcccatcagacccttcccctggaggtggtgcaggaagccgccggcgaggaatcgccggaggaagttgagccggacattgtccgtccatgtcgacgtcgtgaggaggccgtagttggacgacgacgtgcggaccgagatcaccgggggcttgccgccggcgaggaacgtcgtgatgtccttgaagagctccttctgctcgacgaagttggtcttgtcgacgcccgctccggcggcgtcgttggcgaggtcggaagctctggcctccatcttggagaagagggcgccattgtttttctcggtgaagagcttcatctcgatggcgacggccagcgcctcgccggcggccatccggacctcgcggctgtcggagccgaggagggagacgaggtgcgcgtgagccgccgcgcctcgccatggcgcggcgggggacaccttcttcttcttgttccacccgccggtggtggtcaggacgagcgtccacgccgacacggcggcggccagcacgcgggggctcgccgtccccttcgccgcgctggcgagcttgggccccgcgctcgggcagatcaccgcccacagcgcgttcatgcacgcctccgtgtcgtccatgttctccgcggcgacgtcgacgaacgcgacgacggcgaggcactcgagcgcggcgaccaccagggacgcgtcggcttgtggcgcctcgagaatccgggaggcgagcgggtacgtcgccttcatgatcttattcgcgccggagccgagcgggttcgccgccgtctccaccgccgcgatcttcttcgaggtggcgccggggccgagcgtgacggcgagcagcgcgacggcgcggagcgccacgcaggcctccctggcggccctcttcttgatggagacgtagcagccgcgcaggatctcgtcggtgtgcccaccctccgcgtcgtcggcggagaggaagccctcgagcgcggcgatgagctccgccagcgccgcctcccgcgtcgacgccaggctgtcgtgcaccgaaacggcgaccttctcgagcacggcggcattacgacggatcctctgctcatacgcgctcacagccacagcgccgccgccagcggaggcatcgtacgacgtcgaggcgtggccgctagagcggccggtggatttcttcagcaccatggcgaggcggtggttgaggaggcaattgatcgaacacgtcgctggcgcagagagatttcgtgatcgatcgggagggggatccggggatatgtagagagcggaggacgagaccgagtcgtattgggcgtgggcgggaagagccctgccaccgtccgatctgatgaggtttaatttggtacgcacgatttgtgtagaagtggagtacaactctacacaattttccgatcaggagtcatttcaaattagggtaatattgttcatgccaaatacgattcggtaatcttgtcaaatttttataatgttttatgggatgaacttgtcaaattagggtaatcttgttcatgccaaggaggattaggctttacattataacaaaacatgtcgaccaggagtcatttcatagcatgtcagaaacactgggtaataaaattttacaacgttgatttccttgccatatatattttctaattaaacaagcattattaatttttcaaattctgctacaagatactctgatatgatgactttgtgattatagttgtagtaagacatcgtaaaaataaacctttacgaacaggaagtcaattatgcgctatcaagtgctacaggaattttgtgagtatcaatgtaactgcaataaaaatcatgtgttctaacttctaaatctataccaaataataatataatttaaaaatatgtaaggcttcaatcatccctttttccatccgggcccctccctcccacgcctccgcttccgcctccctccctccctccatgtgcctccatctctccccctcccccgcaacccctcttctccctggcaacgcccctcctctcccgtctccctccttccttcccggcaccccccatctccccctcgttgcacacgctccctctctccctcggtatctcttctcccgagcggcgtccctcctctcccctgcgttcccttcctcttacacattcaaggaaaacggaacctccttgttcgggaacacattttgacgcactcactcagccgtgttcaccacaggagctcaccattgttgtttctctctattgggactatgttgttgtcggccgcgttcccattgttctgattttttttcgttgccaaccgccaccatctacggacgagtcatatcatgggacacgtcctaccacttccctcaccgtcgtttggtcgctgaagcattggcgcccatgttccctactcttttttttaaaataatggattataataaacccggcctctacaccttgtgaggatgtacacagcctatattccctactcttttatttctcgccttagctagggaagacaatgaacaatgtctattgggcattattcttcttggtctattataaccatgctcctagaccactcgcataatatttagaccatatgagtatgaatagaatatgaaaattgtaatttatatcaataaaacagacacccgttcagatttagtgaatcaaattttcatatgtgggttaaaagaagtttttccaatttctagctaatttcagttgtttttcatttacattattagttttagcactatttgatccactaaaaaatattataacttataattttctctatattaaattatttatagctaaatgagaaaattggattaagttatataattttcctgatattgaattatcgttctggacaaagttatttgtagtgttgttatttataagtttatattcccttcatcatttatgcccaattgtaatatatggtttaggattttaattaatgtcaatgaatactatttagaatccgttgcaacgcacgggcattatgctattaacctctagataatttcttttaaaaagatagatggactgtaaataaaacgagcacaccacagcttctttcaaatgtatgttctttgcaagaattttaataaatttaatctcattacttaaaaaacgataagttcaatacagtctaagttctaaacatggccaagagggagtttcgggcttaataccaatattttagcaacaaatctaataaatctaactgtagtggttggtgtattgatttattttggaaaaggagcgtgtgcgagttgtctatttcaagaatagattggatctatccggctgcactttagaatattttttagtatttttcgaataaataagaaaagggtgcacgatctcgacgatttacttctgaataaatgcataaatcatatgaaacaaccatagcattttgcgacctattggtaaatcaaatcaatacgctggttataaagtactaatatggactatacttagggacataatatggacttttttcatactaacttatccagcatgcggcttatgctcggcggtagatcggccaggccattgttcgagacttcgagtcatggatagattctcttgggccaatgggttgcactgaccatctccaagatgagaattgctaagaaaaaaaggttatcgtacaattttattgtgaaaaactttcaaacgtaatttcatagtgcaattccataagtaacccaatttactctctcagataattatttttctacataataactttacatgcactggactctgcttggcccaaaattcctttcctagtttcatactgaacttgaggtcagaggctatttggcgctccttgttgagcgtcctctgcttgtccaccttcttcttctgatccatggccatgtcgtcctccttcacgacgaacacctgccctatcagcggcgcctcctcccccatcaccaccttcccctggaggtgcggcaggaacccgccgccgaggaatcgccggaggaagttgagccggacaatgtccgtccatgtcgacgccgtcagccgcccatggtgggacgacgacacgcgcaccgagctcgccggtgccttgccgccggcgaggaacgacgcgatgctcttgaagagctccttctgctcgacgaagttggccttgccgacgcccgctccggcggcctcgttggcgagctcggacgctctcgccgccacgccggagatgagggcgccgtggctgtcccgggtcacgagcttcatctcgatggtgacggcgagcgcctcgccggcggccatccggacggcgcggctgtcggagtggaggagcggggcgaggtgcgccgccgtgtcgcgccacgcggtgggagaggacgacgccgccttcttcttcttccagccgtcggttgtggtcagcacgagcgtccacgccgacaccgcggcggccaggacatgagggctcgtcttcctcgccgcgccgccgagcttgggccccgtgcttgggcggatcagcccccacagcgccttcatgcacgcctccgtgtcgtccatgttctccgcggcgacgtcgacgaacgcgacgacggcgagggactcgagcgcggcgatcaccagggacgcgtcggttgacacctcgaggatgcgggagactagcgggaacgtctccgccatgatcttcttggagccagggccgggttcgagcgggttgtacgtctccgccggcaagatcctcctcttggagcccgggccgagcgtgacggcgagcagcgcgacggcgcggagcgcgaggcgggcctccttggcggctcccttcttgatggaggcgcagcagccgcgaacgatctcgccgcggtggtgccacccgatgaagtgggcggggacgaagccctcgagcgcgccgacgagcgacgccagcgccgcctccctcgtggacgcccggctctcgtgcacggagacggcggccttctcgagcacggcgaccctctgattaatcttctggtagtagatgctcatgccgccaccgcaagcgctgctggtgtcatcgtccagcatggacgacgacgaggaggcgtggccgttagaacggcggatgaatttccccataaccatggtgagcggtggttgactggttgaggcaattgatcgaacaggtcgcctgcacagtgaccgggtggttgaggcaatcgatcgaacacttggcaggcgcagtgagaagcgttcctgaatcctgatggatcggtatgggagtggagaggaggggcaggggatatgtaggcgaccagagaaccgactgcgaatcgggaatcggagttggagtttgcgcggcggctgtgctgattccgaatcggagtttgcggtgcggctggggctgattcgattcggacgggagagctctggccgtccgatctgatcagattcggctgggagagctctcgcaccgtccgatgtgattcaatctggtacgtgtgatcaaaattggaattaaattaggggattatatattgggcttttttttaggggggagatttttcaatatatttggtacggtgtttgcattaaaaagataaaaatccaacgcttcccaataacaggtataatgtaaaaagtatttaagtattagtgtaggtatttagctacttactccctccgtccaaaaaaaaaagacaaaccctgggtttccgtgtccaacgtttgactgtccgtctaatataaattttttataattagtatttttattgttattagatgattaaacatgattaatactttatgcgtgacttgtcttttttttcatatttttttcaaataagacggacggtcaaacgttggacatggaaacctagggtttgtctttttttggacggaggaagtaggtattaaagatagaacgtaaatttactagtagagagaaaatggtagaattatcctcaactttggtattaaagatagaacataaatttgcaagcagagagaaaagagcagaattgtaccacttaagtcatttgcctgtactagcgtatatgttctcttttgtgtggtttcctatatatttacatcgtgttctttgaggtttttatttgtgtgattttctctagatttatattttgttccaagaacacattactagcataaaaattctcatttgcatgatcttctatagatttatattcaaactatatccgaaagaacacatgatcagcttctcccttgatcatgtctccttgcgggtccacatattcaaactatattataagaacagaggaggtctcgttccggtcccttatacgaaagaatttgtgaactacgtaaataactaatcaataagatctcacctattgggcttcacctatgccattgactggttgatctcgtctcatgttgaattctcaacaattctgacggttctccctctatttctttttggagaatttaggtcaaatcctagagcaagaacaaactagtgtggaagacaatgcggaagaagaaagaagacggatctgatctttttcccgtggagatctattcgatgcgtaaatcaatgcttgatttacgttttttctacctatcggtaccagattagttcagccaagtataccatccacttaaaatatccatattttattacctaataattacttccctgtcatcggttataataagttttattccgtaccttatccctctctcgatcaattgttcacattacttcacctctcgatacttctaaatatctcacaaacaccataaaagctctctaagtcatattgatcgatcaaagctaataattactagtgctaactactaatactcgagcaacaaaatcggctgctgcaccggcggcaacatgtggctcgccgtcgccggtgcagtaggcggcagcagatgcggctgccggtgcaccggcggcagcatgtggtggcagcacgccagcgccgggagcagcatgagcgccgtcgtgcctctctcgggctcctcctccggcagcccgaacttgttcttctccttccacacggcttcgcggcacctcctccgctccagcgtccgcttcttctccctctgcttcctgctcatcatcttcctcgccgccggtagcccctccacctcgtcgccgtcgacctcgaacgtctcgccgaacagcgggttgtgctggaggtggctgtggaagccattgccgaggtaccgggtgaggaagttgagctggaggagcttcgtccatgttgtcaccttgagcacgctctgcctgctcgacgacgtcctcaccgacttcgtcggggcctcgccgtcgtccaagaagatttcgatctgccggaagatgtccttctgcccggcgtggcgccgcttgtcgccggcgcccttgccggagggctcggtggcgaggtaggagacggtggcgttgagcgcttccatgtcctccggcggggtgtcgtgcgccagcttgagctcgacgcacgcggcgatcgcctcgccggcggcgacccggacgccgcggtcgtcgtggtcgtcgaggagcttggcgaggagcgcgatcttgtccttgcagctctcgccctcctccgcctcgtaccggtcgtggacgacggtgaggaggaacgcccacgccgacacggcggcggcgagggcctcgggcgttgtcttcctcgcgtcccccgcggcgagcctggagccgcccggcccagctgagctcgggtcgatcacgccgccccagatggcgtccatggacctctcgatctcgtcgtctccgtcctcgccggcgaacgtggcgacggcgaggccgtcgatcgcggcgagcaccttcgccatgtcgtgcgacgcctccaccgtcttggcgaggaaggggaacgcctcggcgaggacatccttggcgccggcggtgtcgtcgccgccgccgccgagggtgagcgcgaggatgccgatggcgcggtaggcgaggcgggcctccctgacggatcccttcttgagcgagaagacgcagcgggacacgatggtggtgtacttgcagctaacctcccgcgccgacacgtggccctcgagcgcgccgacgaggtcctccatggccgcctcccgcgtcgacccgcgcttctcgaacagcgcgacgatgcaccgctcgacgacgtcgcggggcaccatgtccacgcgttccttctccggcctcggcggccggacatggatcggcttctggcccgtcaccatcctcgacatgaatttgccgccgccgccgccaccgccgcctcttgcatctgcacggcgagccatcgccggaaaacctcatcgtctcaatcgatcgaacaaaagaagagaaacaattaaaacagagatgaaggaggacgtacgtgggaactccatgcccggagatcggccggatggagccatggagagatcgccggagactgcgatgactgatctggttgtgcgcgtgcggtggaagttcgccggcgatgaggtaggtggaggttgggacggcgagggggcgagaggaatatgtagtggcggggaggaggagaccgtgtcggcgacggagagggaaggcgcgcgcgggagcgggaggagctcgtgcgccccacggtggatttgaattcgggtgtttcctttaaaaatcgtgcgggtttgagatgggcctggttcgcgcgcaacttaatgggctaaccttgacggcccatgaatatttgggctcggattgtgaagcccagcaacgtgtggaccgaaacatgcctaggaggtaaacaagcccatcacattatgggcttggatacggataacagtgtatgaatgggattagaatttgaatctaacgtttatgtgaatatgttattatgaccgccccagttttagaaaatagatgaaattaaataaaaaaattgtgattggttgagagaagtatgtagaaaatttgaatggtgcaacgttgtgattggttcagaagataatgcagatgtaaaagtgattatattttagaacggatggagtgcaaattttatcaaaggacaataagcccaaattgaaacatactgaatctttgaaatggtgccgattttaatgttgtaatgtacttataatatatagctacgggcatatttttacaaagtcgcatttgcaaataataataataataataataaagtccttacaaagtgcacttgacaatacttttcaatcgaactgaaaccggagggagtattggccatgttgtttcgtggggtttgattgacaagtggaaacactttgcaattctgtgggcagtgtggttgtagatgcattgcttcatttattatggttcatacagtggtcgctacataaaaattcaatagttacatgcacattggtgctttgctttagtaggagttttcgtgaggttttaaggtctctgacctttatatattgagtgtctattaaagaaaactcaaatttattgtgtaccaaaattatatgttggaactgattgatatagatttgttggctgatctcggcttacaacctacaccgagtcgcgcacgttgcggattttacctcctaagagtaagtagccaactactaactccaattcatctgtagccaatctaatagctcattcatataatagttacatgctacactattaatacctggtcccacctgtcatacacacactgtgtcttaaagtccgtgctacagctagctacaaatctatagcctgctgctcttctctcttcttatttatctacttaaaatatgtttgcagctggcttatagcctgctattttacctgctctagttatgcacattagcatggatcctcttctattttcaaatgcgaaactcgagacgttacatagcactagcagaacagacagctatgtttggcgccaatttttttgccagtcttggcgccattcctctttgatttctcctttttcttgctctgccctctctgcctctgaagaactctgaagtctgagcctcgaatttaatactacagttgctgctgcctgaagccaccaacagaagtgaaggctataccacagtgttttgcatatcttgtgcagctgtgctcttgaccatccactagtagccagccgggcaacaagaacctccaaattaaaatccaatggattcctgcaccccacttttccaggcttgacgcactgaccaacagtggactcctcactccttttcagaagtgacatcctcgtcaggtttgcaacttcagaaaaaatctcctactcctacttgatcctactggtactaggactactccttaaggatgacacattagagattagacccggtttgactgaggccgagtttagttttaaattttttcttcaaacttctaattttttcatcacattaaaacttttctacacctataaacttctaactttttcatcacgtcgttccaattttaatcaaactttcaattttagcgtgaactaaacacaccctgagtacaggtaaaacgatcttatggaaagaagataggcatcatttgacagtacgataggaaaaaacaaaggaaagcttacaaaaagctcgtaccttttgtacatttccaacaaaagagaagtatattgggctttgctcacattgttgccatttcaaccttaccaaagtttggtattatcaaattttggcatattttagtgttaccatttgttttttaccttggcgttatcaaattaagatagtgttaaatgtgtttggtttggagccatgccaaattttgatggtgttttttctagaatcaacaacttttggtagtttggtaaaggtacggatatgtttagtttattaccctgccaaaatttggtagagttgaaaatgacaacaaagtgaacatgcctaataatacactggtatggaaattttttcatcaaagggatatagaaaaatgtctgtaggaatttgagtaatatgaaaatgctttgccaatcttatgaaacaaatggtcccttgggatcagaggttaaaacaggagatgctattagcgctgatttaccaaatataaactattactccctccgttgtaggttataagacttttgcctagtgaatatggacaatgctagaaagtcttataatctaaaacagaggaagtacaaagttaaaattgtatttgtttgatttttcttataaaaaaactctttttttcacaaaacatttctgactgaaactatgccacagagaacggggaagtaaactgttctgataagctgtttagaatgtatcctaaattggccctctagagagcttttaacaacttcaacttctcgtaaaatctccaacacatcaaacagttttcctaaaaatggatagctacagacaataacggattgacaaaactatttgtgatttcctgcataatcaattctcacaactagtaatactagtaatttataatgtcgacaaagattacaagttacaataacaaatgctctatgcaccgtaacaaattcccgagcaacgcaaacaactgaacagcgtctgcatgccggccggtggccggtgatgccactgccgtcgctgcagccgcagtgaaggccaccggcgagcgagacaaccacctctccgactccccaataaatacacacctgttgctgctgctcctgtgtttttttttttttacttgtaaggtgttcgtctgtgtgtgtaaataccatcgacgaattctgcgtgctacaggaggaagctgttcacgcggccgtcgacgactgtatcaaatggtggtgatgatctctcgctgcaattcgttcatgtggttctcgtcgccaggctgacgccggcgaggtcgccgccgtactcctccagcaccaccagcaggttgccgcccggcttcagccatgatctcggcacatggtacctgaaattttatccaaaatagtaggtacattttacggtgatctctccccaatagaagtgatcttaagcgttaatttatgaggcaaaaaaaatcgttctactaatagtaattgagtagtggtaaaattgattctactacagtagcagagacactattataaacgtctctttctttttgttatttaaacattgtaaaacattttattattgttgagcatggattgatagtcactaatctttgtgtttctgctctacttgtgtgcttgggatgtggttttttgtggttcttttttggttttgtgcattttatgcaaaagctaagggcagactcagttggattatattatcttgatgtaattgaccgagcctcgataaaacttccattatctaaaaattattgttcagagaaaatttgagttgtgtgagaagatggttatgtgaggctgaatttattaccatctttgggacaggtcgccgcagttggaccggcacttgtcctcgtggtacgtcccggcgtagctgcagccgccgcagccaccggaggccttgtacgaccagtaccggccgacgtggtggccgttcacccagagctggcccttccccatgctgcccatgtcgagcgccactgggtcgttcccggccggcgcgttgaagaaagcctgagacaatcaatggtgacaaaaggaaattcagcaacaggtgacacaaattcagtctgagcgtgatgaaactgtaattccactttgtcattgctggtgcttcttcagaattcagcacttaccttgtgccaagtcagtggctggtagccgccagggccaccccattcgactgcggagcttccggtgacggtgtggagacccagcgtttcgcctttcaggccgacctgataggtccatttctgatggctgaggtcttttgtgcccccatttaggctggagagggtcaccggtccgagcactccgacattccagttctcaaaatggttgccaacattctgaaaatggtatcagatatcagtgttacaggtagtttgagacaagatataagtgtccgggatatcagttaagctgtgatcaactcacagggaggccaactgctgaacttaggatggagatcttgttgctgccctgccacatcttgacacgtccattgtatgtcagcttcgggttgtcgtaaccaccataaacagatcctacggaggaagcaaaatcatgaacattcactaaaatgattggtgttggcttgatctaacatgaaatgtagctaagtgccagtaccatatgatttcccgttcacgaacacctgcatcgagtgcccagcggagtagacagtgagctgaggagactgaccagacctcaagtcatttgtaccaatgttgacgctgcaacaagaattcatcagggttaagggaaaattcatatggcttctaatagaaatggttgaaattttgtcacatatcaaggttggtcactcactatgtggtgtaccacaggtagtctgacttgtcccatgtcatgctcagctgctcaacaaggccatccttcgtgaacgcgctgtcgctcagcgagtttgtgtcctcgctatatgactgccaagcgaatcgaaccactgggttcatctttggcatcaatgttggctccttcacctgtgccattatcatgtaagtacattagaccatgtgctccagcaaggtccagctagtccacataaaggttcaagcttcagtgttccctaaccgttgcagtgttgaagacggcagttttgcagtccggcagaatgctgatggaccaagcaggaaggttgtactgctgcccattgaacctgactttgactgcagtgttcatgtggtagttcgacaggaacgccgcgcatgctccattctttgccttgaagacatatgcctaaaggatttgaccaattatgaatctaggaatatctatggatgatcacatatattgtgtgcaagattgtagcaacaccaaccttctcatagctgccaatagactctattgtcggatcggcagaaaccagcacaggctcagcctgcttgatggccctgtgaaggtctctcaagtgaccccatttcggttgcctaagcagacctgagatgtacatgccatccgtttatcaactgagtcagatccatgtcaatcaagattataaacagaagataaaaaacagcaaatttccgaaaatatctcaagaaggcaggcaggaattcaagtttatcaaagaaggcaatcactgcataccaaattcgtcaatcggagcatcataatcatagctggttgcaatgaagggaccaccagctgtccggccaaaattggttcctccatggtactgcaccagaacatgaaatgcggtcagaacaagtaaaactacattcactgcaacaccagtgttggtgtgaccagtgagccccctctcttctcaccatgtaatagttcacgaaagagccacccttctgtatgaacctcgccacggcaaaagccagatcctccactggccgatgcggcaccccacctccgaacgatgtaaaccttcacgcgcagtaaaatgtaaaaccgtagtaagatcattcccatcagattaggatggtatgaagtgcgacatgagttggaacaagaaaattaccagccggtccaggcctcagtccacatggacggcttgtaattcttgtttgggctgaagtagtcgcagtaaaatccattgcaagtgttgatctgccatggttggggataaaaaagggtaagaactcgcagtctggcacagtgaactgcacaacaaactcattcatttgacaccaccaaggaaggtggagtagtttgtttccagtttctactatcaattatcagtgtaccactgggtcaggggcgtcgtcctgcttgcacatcacccacggcacgccagtgttggtcccgacggccatctttgcggcccaatttgcatacggcttggcaccgctgccaccgaccgactccatcggcccaaactcattctccacctgaccaaatccaccacagaaacatcaattctcagttaagctacactctaagctagctgcattgcagattgcaacggactaagcagagaagctgttcttcagggattcacctgagacatgatgatcgggccgccctgccactcgaacagcccctcggatttcatcatcgacacaatcttctccacaaacttctgcatttccgcctacacgattacaagcaccagatatttaccacatcataaaccccaattcttgaagaatgtaagagaccaaaattgctgcattcgtgttagcacaataccttgaacgggccattgtccgtcctgaagctaacccccggcacatatttcagccagacaggaaagcccctgcaagaatcaccaacattgcaaacgtttttcagatgcaacaacttgcaaccaaacacacactgaaactgcaatgctgcagctgctacattctgctccaaaatctacccaagaacactgagactctgtagaagaatcgttacccaaagttccactcggcgcagacgtaggggccgatgcggaggtggacgtagaggccggcctgcttcaccagcttgacgaacctgacaagatcgtaccggtcgctgaagtagtactgccataaaaaggaggtcatcaaccaagaactcataggaagaagaagaagaaatggtgaggtgagagtgaaagtacctggccctggacgggctcgtgtccgttccagaagacgtaggtctggatgacgtcgaggccgccgtccttggccttctgtatcagccccggccacatctgcggcggcggcgacggcgaagcacacgaagcaagaatcagaaaccggaggtgtacgtgagagagagagagagaagagaagtggtgcatttgggcggcggccatggatggggggtacgtacctcgggggtgctccgcgggtagtggatggagccggagaggaggatgcggcggcggccgttgatgacgagcgaccggcggtcgtacgacacggccgcgttggcgacgcccacgctcgccgcgagggaggccgccacgagcgccgcggccagcactgccacgcggcggccggcggcggcagccggagtcggcgccggcgccattgcaagtgtgtcccctctccaaagaaagctccgagctagctacctctcctctgctcaccctctctcttggcgtgagagagagagagggacagagagagagagagagagagagagagagcagtgagctgcttcttggagaggagcaatgcgtgcgaggcggcaacgtgaagagcgccgcacggtgttttgtggagggtggcaatggcgatggagggagagctcgcctttcttttcttgttttttttttctctctcagtttttaactgcttaattttgatccttggactcgactcgcgagaagaggagtgaagtgggagcagttgcaggctagcagctgcagtagatgggggcgaggtttttatgggagagggtgcagtgtgaagctgagctgagctgagtgaaaaagggagttggcgcactggaagggaagaaggaggtggttctgcgggtgggatgggtgggcccacgacatttttcatttattctagcgtgggcccgtttggcatgagaaagagtagaaatgcagccggccgcccgcatcacgcacacactccccttcgcaattgggccagcatatcttgagattgataaaatcttgttgttgataggtatgttgcctatcaattaaaaaacagatagtcgtaaatgtgagcatccatattaaggctatgtttagttcgtgtgctaaattttttttaagtatatagacacatatttgaagtattaaacgtagactaataacaaaacaaattacatatttcgcctataaattgcgagacggatttattaagcctagttaatccgtcattagcaaatgttcactatagcatcacattattaaatcatagcgtaatcgtaattaggcttaaaagattcgtctcgtaatttacatgcaaactgtgcaattggtttttttttcgtccacatttaatactccatgcatatgtccaaacatttgatgtgatgtaaaagttggaagtttgacgaaaaaattttgaatctaaacacggcctaaatttaggatttgaatctgggtggctgattccacaaccgtaaacctagccagttcagctaaaatttaggttggattagaagggtatatagatttgcgattaaggccttccttgctatggaggatttttttttggatgaaatttagatgaattcaactaatttaagtgaaaacattttattctaaaggaggcattaaggttgatttctattactttattaggttgaaggaattatagagaattttcatacaactgaaaatagctcctatcaaataactcctgaatgccgggattttccacaataccactggtgcacacagccacacactgatgtggaacaagaaccaggaggcaggagcaactgctgctagacgagcagtattgtagaggatcgacattctaacctgacaatgtgcaccttcttcggaaggtaacaagcgtatgcaattcgttttcccaattcctacttcatccgttggaaaataaatcgattcttaggatcctaagaaaaattttgcatcgagaaataaaagaccaaagtatctctcattaatagaaaaatagtgttaatgggttggtaaaataaggtgtattgaaaggatagaacttgatttgtgaactaaggataggtatagaatagaaaatcaatttttttgacaaatattagttactattaattttttttttggatgaagtagactggctactagtgttcttagcttaggccctgtttagttttcacgcaaaaacttttcaccatgtctgtcacatcgaatgtttgaagacatacgtgaagtattaaatactccctccgtattttaatgtatggcgccgttgactttttaacaaacgtttgacctttcgtcttattcaaaaatttatgtaattataatttattttattgtgacttgatttatcatcaaatgttctttaagcatgacataagtatttttatatttgcataaaaattttgaataagacgagtggtcaaacgttggttaaaaagtcaacggcgtcatatattaaaatacggagggagtatataaaaaaaactaattacacagattgcgtgtaaattgcgagacgaatattttaagcctacttgctccatgatttgacaatgtggtgctacagtaaatatttgctaatgacgaattaattaggcttaataaattcatctcgcagcttacaggcaaaatatatattttgttttgttattagtctacgtttaatacttcaaatgtgtccgtatatccgacgtgacatgccaaaactttttacccctggatctaaacacaaactttctcttcttggatacacatggtcatatttatagagcctggaatataagccatacacgcgcaactccaccgatgatacttctcagttcatgcatgtaccggtgtgcatagcgttggggtcattggattagttattagaatggaatccgttcattcgacaggacaaaatccacacgccatgtctgctagatccggccgtgcgtgctcctcacactaataatcatgcatgtgagtgtggccaatactatacttgatagtaggctcctcccatgcacacatgccgctgtcagccaacgcgtcgactcgaatcctagctacgtgcttagtagacgacaaatcaatagcatcatgtgccgatcaaaaggctcgttcagttttgttgcagcaaatgtccaaacaaacatttatccccactgtccaaaatccagatgtcaagaatacagtatatgctaagagtacatattagttactgtattacagcaatgccttatgtgaacaatggcggatcagaaaattgattcgttgatgtcataacgtgtgtatcggtatcatagtatgctaattatatttagatcatggtgttataatatatggataagcagttttgctataggttttgccgaaagtcatcggtgtcgcctgacaccggtccttatattgtagatccgcccctttaaacaatcaaatctgaaatttgctcatacgaagactcaggaccttgggtgctactcatgtcactgcaaccactactattttattcaaatagtttttttaataaataactattcaaataaaaaaatacagatcgaaggttacttcccgtcattttgcagcaatgcccaccgtacttaaatttggtcaaatacgtggtatgtactaacgactagtcgaaaaattgtggtatgtgtagcgtgcacattaagagcaagtactatagtaggttataagccaactataaatatattttaaagagataaataaaaagagagaagagcagcgggctacagatctgtagccagctgtagcaaggacttccagacgtaacgtgtatatgacaggtggaaccagacattatattggttatagattatttggagctaatactgtgctatactattaaacttgctctaagtaggatcgatgtgcggcctccgggcctcgttgtgctcacagaaaaaactaatcaagcatgcaatgcagtacgtgcaacagcaattaattcctgccgcggtttgcttaaccaggatggtgttacttgaatgagaagcggctgatctaattaatcagtcgcgatctctcttaatctagcttattaacacagcctttaatttaattaatagccgagtccgttaaaccaattgttaaccagactaactaaaagggcacttgcacaattgcacgctggcctttactgtaatgcaagcaccgatattgcagctgagatatgatgctagcttgacagttcgagagtacatattagtagtacactagtgcgtgagacattgcctgatcttatagataaccgtgttagtacttagtactactagttaattagcctggctaagcaactttaattgatgatctgtcacgtacactctcctctacactactagaggctagaactttattttagccatccatcatcattgccgactgttgatataaagaagcaaaagatcaggctagaagaccttagcatatgtatgttccattcgaaatggaaaggagaagagtagagatgagagtagtagacacgaagcatgtcgaccaggatctcttaaggaatttctaggaacctttttcttgaggaaaaaacactgacatgtgttgatgtttgcataaagccagctctgtgctgcatttcatcttctcttgcagtagcacattgcaccttaagctagtagagtacccctctatcctaaaatataacaacttataattaaattggacatttcatagtatcacggatctggacatgttctctgtctaaatttatagtactatgatatatctaatctggttctaggttagtatatcttagaaatgaggtagtagtaatatactgcagtgttttgctgcctattttgagggccctattgcttgagaggatatatagacaaaggggaagggggaagagaggccaaaaaggccagccagcagtgagtactcgtatgaagaagatttttgtacctacttgccttgccgtatgaatgtgtcacttgggtttgcttctactttaagcatgggtgatgtaccatcatcggtagtttcatacaaaatttatttattgcttagtgcaaactgaatttctcatgttccaaacatgccatcaccatttgccatggcgaggcgtgttgagatgtagataagcaatctaatattagataaagttatctctcagttgtgcagcctgaagtattgcagaacaaaagcaattgttgctaaaggagaatgcttgagacagaagaagcctaaggaccacaaaagaagggtacagacgagtacataccttcgaattatatgaccatgatgctgttacttggttgacaaatggccaaacagggagtagggcgagtcttgtggattttgacagctctagtgacatctagcacactgttcagcaacatgaaaaatgccgcactccaagatcgttgcttgatccatttttcatttctaatgtgtccgctcacgcgtttccaatttatttttttctataaataatttgaaaccaagttagacactcggctcagagtctcagagaatctagatagtgaaactagtaaaatttgtaaacaaaagcgtgtctctggccacgaataaaaatggcatgttgtttaacctcgccttgggaatacctcactccctatttgtttggtggcattgataacagtgcaggaaagcttagcataccaaacaaaagctctataccgaccccaatcttgttctatttactaaccaattgatttatccagaccaactagatatctttgctattaaaacatgatcagtcagatctttaattaatgcagacattttgattcagattcttgttttatgcaaatcagatcataaactagtaaaagatccacatcgttgttttatgttgatgtccttgtgttatgctgatgtctgtgagcacctttttccctgagcaacggagctcgggaaaaggtagcctggttatatatgtgacaacatgagctgtttaatactgttcttgtttgtaccctcactagccggaacccaacaaaacctacaatggatcttgcactcagcaagataattgatccaatctgaaatcaatctaatcaactgcttgggatcctacggcctagacgaacccaaataaaaaggttgttattcacaagatggacataatctgtactataaaacatactctctctgtcttaaaaaaagataacttctaaaatgaatctggacatgatgtgtagagaccaaaagagaagatacaaaatgcaaagtgcaggcctaatcataagttgctcgctagtcactactcaccacctatcgcttaagatacaataaacttgtaggagcatggacaagaagaatcatgcaactttttgctaagatatttcaaacaattatgagtgcagaagaaacgaacaccatgtttgagttatgtaccttgttagtgcatgggtttgagcaagcaaaagtggttatcaagcttagtcttcattcgtgtgcgcctctatgcaacaatggttcctcacccaggtcaatcctgccaaattaaactgacgctgaacagagtaatccactattgtcttgtatcagatcacctttagtaataagtacaattatctcatactcctgtggcaacgaatgcatcccatatacatatctcatttctttccaaaaagatcccatgatgcagccaaattccccaaaaatgcaattcctggtatttccagaaagagatcatattttagctcgtaaaaatacgagcagacaattcctggcatttccatcatggaacttcctgccatatcctgggtgttatgttcaactgtcaacatattccccaaaaagctagggatatggcaggcagttgacatggttgacagtaggtatgatgttcaatcgtatgaagccccagcagtacaccctaatgcaaacaattcaatatttgtcatcaaataactgttccaattgaaccatgaggaccaggcaccagccagccatgtatacctgtcaaatatagccaaaaaattagcgtctgaaaccagaaaatgtcccatatctatgctcaggtagttcatccactgttttccatgcaatgtttgccatttcggttgccatcgtggcgactcggttgcaccgttattcataatcctgtgacaactgacaaaccaccaactggtcagccagtagatagaacaaatttaactctgatgatgacaatacaatatggcattgcagctatgcagagatcagaagacattctagttactgagctgtaagatatcccacataatattgttcactcatccaactgttgatagttataactgaaagatgtggcatccaacacagaagatctgacaagttatcatgcaggcatttgccggttgaggtaaagtgtagatccctgggaccatgacttaatggagaagagctgagccagcaaagctactctatcataacaactctggcaatttatttggcaccacagatcagaagaaagtactccacataacgtgttcaaaactgcacatataaagcaccactatgttgtacgataagcattggagctgtcctcaactccaatcactctaaatagatcaaggatagcagatcttgtaaatgaaatctggattttatctttgctatccttcagtactataataggtacatagaactccccaataatatgatgatattgatgagagattgacacttggactactgccagtatggaccaccatcacaactgtcacaacagataatagagtgtgctagtaccataataaggtcaatattaataaaccacttcaatacatcaagaaccaaaaacaaagaagatgacagaattcatgggaacaagctattgggccccgtcaggtgatagttaaaagctttctccttcgcttcattccaatcttgaaggggatgcggctaatacccatcagctcagcttgctctgaagcacagaaaaaatgagcttcccaatcttatcataggaaaatttccaaaaatcctattcataatgcacataatgctccctaaggcatgcaaaagagcttatgttgaataattcataagcaaaataaacaagaaatttaacagtagatgcctgttacgttacctagcagaatgaaatgggcaccctaatacgaaatgcttacatcaattgaagattaagaggttgctatggattattagcaggatgcaagtcagtcaggattaaggagtcaactaacatacaaactaatagagaattacaagactgagaatcactacagtgccatacgcaacatgtaactatgtaaggaaacatgcaatacactgcagcaggtccaatttcaacacaaaatataataccactattctctgttcaatgtaggttacagcctatgccttgtaacattgggcatacaacaatcagacatgattctttgaagtgccaatgccgcaacaaacatccaggatttaatatatcaaagcgaacatccatggtgcatttaaatagtgtcatgagaaagatggtgcaatcttatggttgcactaaaacctcaaaatctctctacatcataccaactaaaggtatacatgccagtgagcatacgtaagtgagcaatgccattttcatcagctcttgcaaaaataatcaaacagatgggatatgctatgcaagaattgtaacataaatgcataaaattattcaatagaaaagaatggcaaataatgagtatcctgacaaaaagttgaacgtggcatacaaaaactaaatacaaaattatgtcccagctgaatggacattaccaaagagaaaaaatatacaaagagttaacctccaaagtttcttcctttttgatctctatccaggggttaggatgattcatttatctagaagaggatgatgtgtgaacagcacacttcatacttctttgtttctacattgataaccaggttgaaattgctaacagtatacccattgttcccagaccatacatgacaatagtgtcagcattcttgacatcaagctgttccagcagaacatctgtccacccatgggaccttacttgtgcttcctgcatgttgcaatttgctaagcattagcttcgaaaaacaacagtatctcaaagtttactaaaactcactttcacttcttcaatgtttgatcttctttggctagccttattctgtaacacagcatggttcagtagattatctccagtggatgggatggttccaatatcatctgcagctaagaagcctgagtaggcagaatctgtgtggatagtattcatgactgatccaaagaaatttgtcacagggacctgaacgatgacagaaaaggataaaacaattgtgaacaaaattatgtattagattagaaacaaattttaacttatgctttacctcatttaatggccgttcataaagatccatccgataatacgcagtcgacaacagcatagaaggattataggagttgaaaagactgtagcataacaatgaaaaggttataattgtatcacaaagatactattttcaatgtatgagatgaacactatttcgtactctgtatggttaccaagctacatgcttgtagagtcttagtaatacaagactgcatatttaagcattattccacacgggctagttacaaaatactataagacacaactactctatggtgcttttagaaatatatgactgaatataatttagaattattgcacacacttagttataaaacacaatggattccgaaaggtcagtaaatccattggaagattgatatatactccataaaaaagatgactcatgttattcgtagttaatgcacatcccagtaaattgcattttggataaagtaaatactaaatatatcttgtgtgatgtagatacaataatcaaattgctcacagttaatgcacatcacagtgataacaattatatgcatacaagaaagctctacaaataaaattatgaaaaaaaattttcgagacattgtaatgaattatatttggacatgtaggaattaaagaacttgcaaccattataatagtgtacaaagtcttttacctgttcaatgaggcattgctatacatgttgagtttctcaaagaaagcaagtgtataaaaggtaaacctatccacaacagaaacaccaatctgccacaaataaatagatcaggtatcacccagtgataagacaaaaaaagttccaaataatatatgagacaattgtaaatggaaggcatgttctcacgtctgaatcaagatgatgagaataagagttttcacccttcatgctgctaccaatcgttaaaacaccaggtgattgaagctgcagatatttaatatgtcaagtacagctgtagatatagttttcatatgcagaaaaatgttgaccatgataaaggaaataactaaattgatcatacaaaattgtctatatcaggtcttagtgcttttacttatttatatatctgcttggaaaatagttttggtctgttacctacagaatacttgctagatggtcactttaccttttttttttatttctgtaagacagtgtatgggtttctaggaaacctttcttgccatattatttctattactttgtaatatattccagtggagcattcccctagtgttctaaaaaatgatgtgaaacactatcaattgataaattagtgtatcaaaatgtagtaagtggaaactggaaagtccacattcgtccaactgctctgcacaaatacagcatggagtctttggaattttttattgtctaatgctccctccggaaacaagtacttgttgtattgggcatgcatccagtcaaagttttaatactcttgagtattaataccttcttaaatatttaattaaataggtgaatgatgcatgtagaaaagtactttcgttatattataattttaatggcttctactattatttcataatggaaaactaagagtcaaatttgcatctgggagaccatttcgatacctaaattacatttgtttgtgaacagtggaagtagttcttaagcaataaaacataatgtagaaaatttcacataagcagctaataaattttatagtatgaattattgacttgacagtaaactttcaaatgaacaggcacataatgaaggtgcaaccaaatattatctcaagttacaaaaaagaaacccttatgttgtaagtaaaggtgcttgaagtaaaatgttatgggaaataatgaccaagacactgagacaaacctgtgaaaagagagtggcagcttggcatgtatctaccattatcaacaactctttaaatctgaagtgcaggtcagagaaaaagacagtttgaaaaactgaagtatgaaatgaagaggagcaaaacaaaggccaatttttttggcaaaaaagaagaagaagaagaagattctgtgtatacgagtaaagaaaaatattacaaaaaagcataaggtaaacaaatcctacctatgcttctccttcatttgctttactgcatctgctaaatcatggctctgaagttcttcagaatcttggaacttcaaaaactcatccccaccatgtcctgtcatatacaagagaatatggcttccttcatcacttaaaagacgctttgatcttggtacagcactttcatgtcttccagtcaaaactctcaaaaagttttcaactgtcacctcataacctcggtaatcaacctgccattaggtggccaaaggtaaaactagcattaaatcagatgttattcttaacataaccataaggtggtaatcatgaatgaacattataaagtgttaccaacaaattgcattgactagatacaccaaaagtggccattttaccatgtaaattgttcattgtgatgtttaggattcagatatttcaggagtcatattttcagagtaaggaactcacctcaacgttgtcaccatatagattaagctggtggttctcattattgaacacttgggcaggatagttattcctagggttacaagccatatcatccgccaacataagtatgatccgctcgtcgggtattcctaatctcttaactgtcctggaggaaacaaacaatgttttgctagtaaggaataatctataatctatagatactacagggaataacagatgcatgagcataattaatcaagctacctgtacagagacagagtatttgccatatgtcgataattaaacctggagaacattacaaaattggttagatatcaaatgcgcgaagtaatcagcatctggagaacaggttagaatatcaaatgcgcgaagtaatccgcatctggaagttgaaacaaacccctagcaaatacgaatcgcttaataggcgaactaaacaagcatgcttccaaactggatctctcggccagacgaagtaaacaacggtgcggggggatgaggtctcaccagaagcgtgaggtgcagacgagcacggcccagttgttgttgtgcatcgcgcccggcgacgacgccgccgcggaggaggaggtggagaaggccaggagcatcagcaacgccgggaggaggaggacgaggagggcgcgagagggcccggggatcccgccgcggccggacgccatgccagcctccggcggagggggagcgccgccggcgtggccgggtcaggaatctaggggaggaggaggaggcggcggcgcgagatcgtcgctccggcgaacgcggcggtggactggggcggcgcagggtgaagggcagccggggctggtcgccggtggaggagtgaggaaggaagtcggtgggcttttttggtcgtgacgaagcaggcctccttcgcgtggatgggggctagttgatgggcttgcctcgttgggccgacgaaatgttaaaaggacgaaaagtcccatgtgaataattttcactctctttcccgatttcctttttaggtggtttctttttcaccttgtattggtcaggtatttatttgggaagttatggacgagatccctagtgtaggtctattaatgtttcgggaattttctcaaatcagattgtatgtgtttacttgggggctgctaattggggcacgcgtgctagccgcgtaactcgtgtgcgctcctctctctcgctgctaatgacactgattagtgttaatggtaatatttaatgttgttttaaaaacaatatacatcaacaatttagttaaaagtttttaaaaatagttgaaagttttaaatgttggcttgatttttatttaatatttgagttgaaagtttcaaatcttgagttgaaagtttttttaaaatttaagtttaaagtttttgtaattgagttgaaacttattggtgggacgattgaccctcattcggctagatggtgatgatggtgtgtttagttcacgtcaaaattgaaagtttagttgaaattgaaacgatgtgacggaaaagttggaaatttgtgtgtgtaggaaagttttgatgtggtgtaaaagctgaaagtctaaggaataagttcatctgaggtcccttaactttacactgaattcgatttttgtccctcgatcggaaaaccagacacaacgggttcctcaactattaaaactcgtgcagattaggtccctcggcggttttgagagcggttttggctgacgtggcgcctatatggctaatttgactcggtcttcgtccgatgtggcattgacgtagcgcttacgtggcaattcgacccatgggacccacatgtcagtctcacatagaaaataataaaaaaatcgtgggacccacatgtcagtccaactcacccgctcttcttcctcctctctccccatctccctctcttcatctccctatctctgctctctccaggcgccacggaagacaacggcgcgtggcggcgcgcggcgacgcgcggccggcggcaggagaggagggagcaacgcgcaaagaccggcgaggcgggcagggagggaggacgcagggaggccggcgatggccgagcgccgtgggcggggacttgatggcgacgaatggagggagaggtgcgcagccgacggcggccagcgggagagggagtggcgaccgccctccgccgcggacgacgtcgaagtcgacctcggcatcctcggcgactccctgttccgcctaccgccgtcgccgatccccttttatcgcccgggtcgatctgttccggccaccgccatcgccacgggccccctccctccgcggcgttcaggtcatcgcctcgcgggcggaggagcatgcccggcgccatcgcctcgcgggccgcagccgcgcggggcctcgtcccttccgccgctgacgccaatggacgcggccgccgccgccgcaccacgcggcgtcaccgggcggcgcccgagctcctccgccttcggcggcccgcaaggcgatggcacgccatggagcggcggggagaagggcggcgcacctctccattcccaccgccacgcggagtcggccgatgctcagccgagcacggctgcgccggcgtcgcccgcggcagcctctcctcgtgtcgcccttccccaccacgccggtccatcctctccatccccaccttcgccggccatcctctccatccccacagccgtcggcctcctcttctccacaccgccgcgccggccttcccaatccaccgccgccccgtgaagctccccttccttccctcctctgcccggtgccgccccgattcctccccccctacgccgcctcctggccgcgctgccgagccgccgcgcccggccgctgctgttgacgccgcgccgacctgcccgttccaccccgcgctgatctcacctccatccccgccaccaccgagttccccgccgccgctagcccttccccaaacccaccgccgcccatggagctcacttcgccttcctccccttcattgccggtgccgcgccgtcgcgccaaaccgcctccgcacgccgcgcctggctgcgccgctccctcctctcccgccggcagccggccaccgcgtgccgctgcctctccgtcgccgggagagagaagaggagatgagagatagatgaaggggggagatggggagagagagaaaattgacatttagccatcttcaggatggggtttcgccagaatgccaatccggattctagcttcgttataatgccatgctcggacggcgccacattgctgctttgccattctcaccaaattcgcatatttccaaatgatttcgatgattttccttattagtttggaccgaaatgccctcgccggtcggtttagtcgagctggtccagccgcatcgcttggcagagtacgcagcgccaccacttctctccgccgctaccccccactgctccgccgtccccctcgccctcgccgtcgccgtcgctgtcgcccttgccgtcgcccttgccctcgctatcgccctcgccctcgccctcgccctcgccggtactcccccatcgccgtagtccgcgcgcagtccgcgacggaatgcttccagccatttggaaatcgacgagctcgacaaagttcacaacttacccggcgaggagctcatgccaagtgcagtccatatgctcaaccgtctctgtcccgacctcacaccataagaatggcggcggcgcgacgacggctagatctgagggcggggcaactgctacatctgacgccgcggcgacggctgcaacggctggatctatggcggcagtggtggtggtggtgtaggtggcgggtggcggcggctaggttgggggggagcggtgtcgagaggaagacgagaggaagatgacgactggatggggatccagctcccacgcaagtcaactaatttggtgacaggggcaatttggtcacacaacggtggaaatcatttggaaatatgcgaatttggtgagaatggcaaagcagcaatgtggcgccgtccgagcatggcattataacgaagtcagaatccggagtggcattctggcgaaaccccatactgaagatggctaaatgtcaattttctcggggagagaggaggaagaagaggagggtgagttggattgacatatggggcccacgtgggtcccactatttttttattattattttatgtgtgatactgacatgtggggccacgtgggtcccataatttttttaattattttctatgtgagactgacatgtgggtcccgaggattttattatttttccggctcgaattgccacgtaagcgccacgtcaatgccacgtcatatgaagaccgggtcaaattagccacatagacgccacgtcagccaaaaccaccctcaaaaccgccgagggacctaatctgcactggttttgatagttgagggactcttgtgtctggttttccagttgagggacgaaaatcggattcgttaacaagttaagggacctcaaataaacttattctaaagtctaaaagaaaaattttggaactaaactctgccgttgtactctttcttaccctcctcattcttggccatgatgcctggatcacaccttctcttcaccttttcttctcaagccagctatgattatggctttgtacctgtcacgctgacatcactcctctcctccaccatggcttgtacggccgtgccatgcatgcagtctgatgcagagctttgttgaattgttgcccagatgacggcggacacagatgcagccatgcaggatgctcctagaaggtggccagcttcaccgcgaagcgccacgtgtcttccactcattcgctgagagagaagataaaaaaaaaagaagagaaaaaacttcaacctggcagaaaagcaagtacacagagttcagatttatcatcgtcgccgacggggacggagagcaaagccgccacgctgtcaaccgtccagccaatcccacgctcacacctgccactgccccacatccccgggcccacctgccagtccccgccacctttccccccaaagatccaaatctcctccttttattatgccaaacccacccccacacgcgcgcacgacacgacacgacacgagcgcgcggcagcagcagcagcagagcgagctcgagctccagctgcgtcggccgccatggcggtgagcaacaacatcacggcgtgcgtgacgctgatggcgctgatctgcgccgtcccggtgatcgcctcgggcgtgtggttcgcgtcggcgcagggggaggagtgcgcccgcctggcgcggtggccggtggccatcctggggggcctcatcctccttgccgccctcgccggcttcgtcggcgcctactggaaccgccgccgcctcctcgcgttctacctcttcgccatggcgtcgctcatcgcgctgctcatcgcgctcctcgtcttcgccttcgccgtcacccgcggctccggcgcctacccggtgctcggccgcgcctacgacgagtaccacctcgatggcttctccatgtggctccggggctacgtctccgacgacccggcgcggtgggagcggatcaaggcgtgcctcgtcgtctccgacacctgcaagaagctggcgcgccaggccgggttcctcaccgccgaccagttctaccagtcgcgcctctcgccactccaggtatagttttttttttctttaatctcattttgttctttaatctcattctgttattagctactgttaatcttaatcatctcatcgactagttaaacttgtcttaccatcttcagaatattttaactgagttcaataagatttcattatctaaaaatcctagtgttaccactataaacttactagcggttgatttttgaagataaagctataagcttagttaattaaatccttttaacctcttttctatatatcacttactcctgttttactgcataaaacatagtcaatacttgaactccttgcattttaagacgacttttatttagaaacagaagtgttaaaattaccctgaccgtccatgagcacatgagcagctatgacttctagctgaaacaaagcgtagaacttttcttttttttttccctttccaaggatcagcttctctgagcatctagagataggagatgctactggaagagaagaatcagatggcaactttatatctcagtaggacacatatataaaaaaaagaatgactgaattatcagcactgctcgctgtcactgagcggtgggccatccctcttttgacagtgtacaaatgcaagtgctctaaaggggaatccatgtgtaggtccatgtaattaagctttttttgggtacaaatcaggcaatgacatggacggggaatataattgcgtaatggggcgatttcctggtcggatgtgctttgcttaacaaaaattctccatgcttttgttagctacaaagattatagagacaggtcattttcagttttcctttttcccagagaaaaagagaaaggagataattcagtatgtacataaggttttcttattacagacaagattggagacaggagttcgtgggcggtgcatgggggagtgtgattaattttggtcttgttgattttagagttcattactgattttgtgttgccaacgtatggggcttagagtttttaagagttatcatctctctgcgtcctcatccgcgcagagtttgtctgtctgtgactgaacattttagtactgatgattagcctcgaggctcatgcgtctgtctaggaagaagtatctctggatctgcctgccttggcaccatccatccttggtgcttcatgtggtgtaaaagccaaaaacaaaaaatctcacagatctacctgtaccaagaaatagataccacaccgacaaatgattatatttttttcatctccaataaaaataaaaataagttttggcttaactttgttggtgcaagcaaactactctgttttatattataaaccgtttcgaagtcaaacctctttaactttaactaagcttataaaaactagcaatatttttaatagacgttaacaaaactattgtcgatgttgttattttttttaagaaaaaaacttcatatgtcttttgtgttataacataaaatggaggtacttaacttcgaaaaagaaagaacattcaaattcttttttaaaattaaattaagcgtgctattctcaatttattcttaatcagactaaaatcaaactttctggtgcttataaattattatatttcagttttatcccattcatagaaaggagataaaatgagaaatctttaccgtccaatctaattagacaatactagaggtgtaatatcaactcatcagctatgaataactgttcatcatctgaaaatgagaaaaaaaaataatctcctgtgtgtgtgttatatatgcagtccgggtgttgcaagccgccggcggtgtgcgggtacaactacgtgagcccgacggtgtgggcggggccggcggcgcggccggcggcggacgcggactgcggggcgtgggggaacgacccgtcgcagctgtgctacgagtgcgagtcgtgccgcgcgggcctcctcgcggcgctccgcgcccagtggcaccgcgccaacgtcgccctcgtcgtcgccaccgtcgccctcgtcttcctctacctcgtcggctgcagcgcctacaagaacgcccaggccgaggccctcttccgccgctacaagtggtagcagcagcagcagacttccccccccttgtaatgcaatgccctctgcttcaattcagcttcagaatttgctttctcttcttgtgagttgtgatcaatgcaagttgtatggtagtagaacatgctagatttgggttattgtttgtactgttgtagatttggagtagtagttaagattcatggccagattgtgatctaaaatttcagtgtgatttggttggtttattatgatgggaatttgtcggtgttcgtcactgactgaattaacctgctactactagtagatgtatggatcatggattggtttgttcaggggacaaaaaccaagcatgctgcgtgtcaatcttgaagctagtcaggttttgtcagggtcgtcatcttgcaattgtctcttctcttggatgccatctgactgtctattgcatgtcagttactgtacttgcttagtcacatggccacagttcgatatacagtagaccacatacctgtctgaaatcctgactcttcagtccctgtaaaagctgtaacatctccaaacaaaacaactgtctttctgaaagagaatagtagttcagttttttcacacttcagtatcgaccccgagtctgaactctgaagatcagcttcaagtatacatacatacagtacatctaaataaaattgtaaatgtatagtaattctagttcatggtattttgagcacttatacaggttacatctacacaaccattttttcttttcagacaacacgcattagagtgtagtgacatctacacaaagcaagacctgaacacaccgtaaacagctgaacacagtaaaagtaccatctaactgaaagttcagacttgggagagccactaactagcctgaaactacaggcttgccttgctcctgcgacagctgctgcttggagttggattgagatggtgggttgaacttggtgaagaccctgaaggcggagatgagggagagcgccatgaagcagaggagggcggcggcgttgagcgccacggacacggtggcggcgccgcagaagcggccgaagtaggagcacacctccccccacgacacctcccggtcgccctcccgcgccaggtacaccacctccgccgccgccgacgccgacgtcagcagcaggtacgccgacgcctgctccggcaacggccaccgccggatcaagattcggtcagtgttttttatgtgttgccattgtttaactgaattgctggaaaatttccgctagtatttgtattttgtctccaaaaacttttagatttgtgatcatcggattgccttaatatttgtgcatgaaaaaaaatgcaagaaagaaattttcacacggatcacgtatatgttgctagccaaccaaatcataattgaatacatgttttatataaattatatggttgttacaatgcagttaaagtgtagtttaattacacttcaattatgctataattatatttgaaagtttttcacttaaaaaacatacggcaattttttacatactcccttgtttaatttgatccacagttaaggatgtctccgaatctcatgtgattatacatcgatgcttttttccttaaaagaagaaacacaacgcaatcatagaccgctcacaacgcgcaaacccatcactatgaacgtacgaacggacaccttacctttacgatcatatctgataaactgaattgctatatctacgatgcatagatgttggttctattaaacagatgatatgttgatatatactatcattgatgacttgttttcttaaaattaaaaaaaacaataatctcctgatgaaactggatttatattagtactaggatatactaggttgcatgctgctgctgctacatttgtacataaggatagtgaattggtatcatgttaagctcaagaagagtgtttttttcccttcaatatgctctgtgatgaaatatgcgtctaaaatctgaatcaagtagttcaagatagaatggcatgtttattgccaatattatattccttttaggtttctctatcggtttatcctgtgcccataataagaatctagcttccttccagtactaattattgatgtacagtttagccttgaccaacttattaattataatcttatcctagcaagtattagtactaaacacttcccttgtatgtacttatgtatattataatacttactctatatatgattgaatctttttttgctgcaaaatatatggttaattgatcattttttctttctttcattttcagattttcttttaaagaaacaatatagaagttttctgatgagatgaatataaagagggagaagcgaggttaggagtaaaacctgatccaggaggaaaatgagccaatcaaagcgagtgatgaacctgcaggatgacagcaggatggaggccaccgagtaggcagccgtgatggcgttgatccagaccaaatacctgatggaaaaaaaacattgaagtttagcatcgtaatactgattatctaataatctgaagaacaaactgcacaaagtcatcctataatttatctaaaactagattaataggagcacagggacggtaaataaatatatatacatatcagcacatgaataaaaaaagaacccaataacgcctttattgtttggccaaatgcagataatacgccattcgacgtattagcaaaataataataatttatatattagatttttatatatgtgttcttagcgacttaaatgtcaaagtaaaacataaactttaataaaaactttcaaattaactttaaaattcggtttgaaaatataaattttggcagccactgatactgtaaggaggaaacgatggaggctatgtcaaggtgattgattagtaaaattcaatttcaggaaagtgttagtactgtaattaattaagaagataactagtcaagcaagacggagcacacggtgagtttacctgaagccggagaggtcggagaacctgacctccccgtaggtctcgtccacctgcttgttggtggccatctcccacaccgacgccacggcgagcggcaccgcgcacacccggagccccagctccgccagcctgaacggcgccgccaccttcaccttctcctcctccgccgccgccgccgccgcggtgctcccctcgccgctcctcatcttctccgacgacgacgacggaaatttccttcgcctattctttctccgacctgtctcggtgtgcgaggaggagaaaatcggtgaactgtgaggactttgcgcgcaagagtccaaattggagtggagctagatagatagatatagatatatggcgggattggtggcttgtcgtgcagtgtgaatgactagcgagtgtgtgtgttcttgctcgcgagtgtggggggtggggcccacggaatgtcgtcgcggcgcgcgcgaagactggacgagtatggcaggtgtaacgtgggccgtccgatgttgtgatggacggatcggatcggataggatggagtgcgtgagttgccggggcagcgagggcaaggtgaacagtgtgtgtacagcgatggctgttgaaaattattttattagtagctactccctcaggataaacaatactttgttttgaatatgactattatcaaatttttaaaacttcgactataaatatcacataagatatttgtcttaggaatgtggagaccatatatatagattggtggtaaaaagtacttcaataaaaccatatatttattttgtaataaaagtagtgatcaaggttattttttggagattgtgtccttgttcaaaacaataagtattatctacctgaagaaaatagtagctagggctcattaatagtttttgatatttttttacgaaaatttacattgtgacatcttatcccaattaggatgtgccttgtgtggcccatgagaacggtgtcaatatgtttgatatcacattactaattaaaaaattgtggaaccaacttataaggatttgttcctccaaccatattatttatggtttaaccttttatcatgaaacaaatatgaaagtttaagtggggtggtatgtgtagcaagtggacccacccatcaagtggattgatttgcatggttctagaggacggactattacatacaggattatttaaagggatttaaacttggttttagagataaacttgaagctcacaccctagctgcaatatgcttgccttcttgattttggtggtaagcttggggttcaaatcctagctgtcgtatgcttgcctagctgtcgtatgcttgcctccgcccctagtaggctagtactgctactgatgttctatttaaatttaaatgtaagctgaagattttgacaaatagccgatgagtatttagttagcaaaggattaagctaaatccaactttcatttttataaatgggagtggttggtgtggggatgagcgttggagggagtggggagctaaggccgggccgcaagcttttgttagtggggccggggtaggaggctaaagtagcaccgcacgcgaatggcgagaccacccaccctatctccattgccgccgctcaaaaaggccaccactgcaaactgcaaaagctcgccagaatggctctccgtgcgccacggcgcgacgcgtgatctgaactcagacagaattttgtggcctgtgtgttcatacgattgattaatcgatcactccatctactcatgcttcatatagaaaaaaaaatcaaaaaaaaattaacaaacaagtcaagaatgaatcatctcgtcatcttataggagtatcatccttaaagacagtggccaacagaatgagtgcgagggagaaccaaagtatgaaagtccgtatacagcaatacagggctgtggccggtgtgcatacgtcatcacctgactatggtcacgtcagctgtcgattaagaggcttaggctcagtttggcacaactcctcatacaagattttgcgggggttggatattcctaacttcacaaaaaattatggatctagatctacaatttcatgcataaagtggataaatcaatttgttcttattgtagatgaaattttaaattttaaaaaagtataatttaatatagagatattaaatctaccgtggatataaaatctgaagctcttctagacatgatctgtactacctattggcctagtggcccgtcacattgttgggaatgccatacgtgtgtcaatgggccatcctgggccttattcagggcgactcaaaatttcgtttcgttttggtgttaaaacgtggacctcagcaaagatgagcgaaatccgtaaaattagacaaatttagtttgatattcgataaaaaccgaaacaagtggtttgttagtctacttgataccgacactaatacagaactaattttttggacgagactccttttagggtgtagacagaccgtaactggttgcacctgcaaaaatcgatcgatattttcacatatggctctttaaggggccaacatgtaaaaattgattttcacaggtgcacctcttaaggggccacatgcgaaaataagcctactttcgtaggcaggcctattaaggatccacctagaaggttaacttaccttctcttttccctctcaacacttaaaatattttcaagcatcatccttgtcctcttatctctctcacctcctctccaccttagactcctctcttctctctctcacctcctctcctccctctcactgggcggcagcgggctcggctatcttgggtgatcggcggcgggctcggcctgcaacagtcgccttggcttcctcgggagctcagcgatggcaggctcaagcaggagcggctagcggcgggtggatctaccgccgctggccccgcgacggtcgggtccgccgccgccgccctcgggacggccggatccacgtcgccatcgcaatcgccatcttggtggtagggttttgattttttttggttttctttgtgcggatgacacaaacacccgcatgcgaaaatagcaattttcgtttacactttcgggcggacgggcggctcaacctcacgcaaaaatagaatctaaccatttgaaaaatgctttctgtactagtgcgacatactataataagatgtcctagcatttctttttgttgttgtagtggagatgtcatagcttattctcatcattcatcaaggttcatcatgagagaaattttacggttctcgggaaagtatctggagatattaaaattttacactaaaatgtagtaccttctgataccattttaagtatggtaaaattactcatcgtgtacaacggattttataactcagtactactcaatgtgaccatacttctctcagtttcattttcatcgatataacttcacagcactaaatgaagaagaatggtattggcaaattaataaacttaacaagaatggaatctaaaaataaaaaaagctctgacctcaccaatttctctgacacacaaaaaagaacatacctgtctctatctctcccctctctcccctgtacacgtgtagtgtgtacatccactaacagtttctggttgatacatgcatgaatcagcagagcagatggctagcttaactcaatttttgtttttagcctttgctgcaccttctttaaagaacagaattctaaagtgatagccactaacccatggagactgtttcatgtagttgacaaatctacagatttgatttggtccaaatttatatataggcctcaacattcacgcaccctcccaaactacaacattgtggcatatcattccattagcttgtttatactaaagtacatgacctgccgacttagccattttttatttacttcaaatcctgagtataaacgtcagatctgactgcagatgaactccaaattcagagtttcagagagttatttatatatcagttactcctatacttgcagggcataaacaaaaccggaaggtcaaacagtgaggccaccatgaatgtaacccttataatgtagtataagaaattaagagtcaatttaagtttacctgcctatatcatgatttgtttgtgagagttgttgacaaattaattagtcttgtatatatgtcagctgattagtaaggtaagctaatattaggccatgtgttttcggcaaaattactctaaaattcactctctgaatttgacagattaattagtctcctaacgccagttgataagataaggctaagtgtttcctgtaaaattactctaaaattctcactcactacaatagttttcaagttaagattcagtaattggttttattaattgagatgtatagctacgatgtggcgctgagggttgacaaaatgttgtatctttagtaaacaaaagcactgaagctttttagccattctgttcatagtttatatatttctgtctcagcctgcgaggcagaaatgtatattactcgtgtccttatcactcttgtgctttaaaagacaaattaaatcattaagaattctctgcaagtcaaaacaccaggagatgacgagactgatgatcaagatttgttttttcttaacaatgtttcagccaccattattattattttctgtcagaagtcaatacatttatttcagaatactagcaagaaatcaacgcaatgctctgcactacctacatttgtcaacgtttctaaggccatctataaatgtcttggagttttgacctaactcacacaagctctaatcgtctctttctcggttcatcacctgaactgatcaactgcaaagcgtccgagttgcagtgttcagttcgctaatccgattgcatttcggagagatggctgcaaggtgttcgatcgcgttcatggtcatggcgagctgcctgtccgtcgtcgtctccggtgggcttcccggcgatctcttcgcgcacagtgtcgcctcgaagctccgcgtcgaccgcgacacgacggcgagggcgtcgtcggacttcggccgcatcgtggcggccgcgccggaggcggtgctccacccggccacgccggccgagatcgcggagctcgtccggttctcggcgtcgtcgccgtcgccgttccccgtggcgccgcgcgggcagggccactctgcccgcgggcagtcgctcgcccccggcggcgtcgtggtcgacatgcgtgcgctggcggcgcgccgcggccgcgtcaacgtgtccgcgggcggcgcaggcgcggcgccgtacgtggacgccggcggtgagcagctgtgggccgacgtcctccgcgcgacgctggaacacggcctggcgccgcgcgtgtggacggactacctccgcatcaccgtcgccggcacgctctccaacgccggcatcggcggccaggcgttccggcatggcccgcagatcgccaacgtgctcgagcttgacgtcatcacaggtaattaactaaatagtccaattacacatgaacacttttaacactgataattaaatgattgagcgactattaacattgttgacaattggaatccaggaaggggagacatggtaacatgctctagggacaaggagccggacttgttcttcgcggttctcggtgggctgggccagtttgggatcataacccgggctcggattgggcttgagcctgccccaaagcgggttcgatgggtccgcctcgcctactcggatgtggtgaccttcaccagagaccaagagctgctcatatcaaagcgagctagtgaagcagggtttgattatgtcgaaggacaagtccagctcaatcggacactcacagagggtcccaaatcaacacccttcttctcgcgtttcgacattgataggcttgcgggacttgcgtcagagtctgtgtcaggagtaatatacttcattgaaggtgccatgtactacaacgagtcaactactgcctctgttgatcaggtagggaattatgatccgtttgcaattagtatataccaccacaaaaaatactattgtgctttaccccctcaaagggaatggtgaataatcttttattaatgattaattttgttatttccttgcagaaactgacgtcagtactagaacaactcagttttgacaaaggctttgtgttcacaaaggatgtgagctacgtgcaattccttgatcgtgtgagggaggaggaaagaatactcaggtctatcggcatgtgggatgtgccacatccatggctaaacctcttcgtgccccagtctcgcatccttgacttcgacaccggtgtgctcaagggtgtttttgttggtgccaatcctgtcggtgtcatcctcatgtaccccatgaataggaacatgtgggatgaccgtatgacagcggtgtctggtaatgatgacatgttctatgtcgttgggctactccggtctgcggttgtccccggagatgtggaacgcctggagagggagaatgaggcagttctagcgttctgtgataatgagggcatcgggtgcaagcaatatctaccacactacgcatcacaagatgggtggcgaagccatttcggggccaaatggagcagggttaccgagctaaaggtaaagtatgacccatatgggatactttcaccagggcagaggattttctcgtcactgacaccaatggcattggtggctatgtgaaatggtagttttgaggtgaagactgagtagtttaggtgtttgtggattcaattttgaggttatataggatgaaagtaaattgagttgaatgcgagaagctgaaatactggtcagaactctggaagaaggattgtagctttattttaggagatacatgtaggaaagttaactgtatatcattaattttattaggaggttgttctaggttgtatttgccacactaatttttttaggatttcttttgtttagcaaggcatgcaaatgtaataaacataggaagatttgtacaaaggaaataaagggttgcttgaaatcattttatgtagtttgaatttcgaaaaaaatatgaaattgtttttttttctctggtgtatggtgatgatgccattcggtgttggaatgtatttttcgaattcatttcttgcactaattttgatttttgatacatccatttttcatatgttggttgcagatttaacttgagtttatagttcccatatgttaatgaaggacacattccataaatgttgtgtttggtgctatgtttttctattacccacctcctttttttataatgaaatgcttcgttttggaattggttgatgcaatacgtccactttgttaaaataatatcataagaagaaataacataaatgttaatacaatgacaagaacattataaaaagtacgcacagtttgatttttgagaaagcaaatatgaaaccgccacttcttttgcttggtatggtgatgataccatttggtggtggggtggcttttgaaattactttcttgttcttattttaggtataactattttcatatgttttcttgcatatccaacttgagtgtataagttatgtatgcaaatgaaaaaaatattctataatatatgggtggaggaattcataacaattttgtggttagtgatcacattttccattaagtcatccttttttacaattaaattgttcattttggaatagattaatgtaaggcatccactttgtatgtaaaaaatagatcacaagaagaaaggacataatacttagaccaaggcatggaaattatgcaaaagggacccataagcacttaacaaaaaagtatatccttctttctaacaaatgactacatagatcattgtgttgcacacatccataactttttgactttgtgtttatttacactttggaaaaacaaggacaagaataaaaaatcggaagcgctacaatattgataatgaaggacacgatggccaaacaaaaatcacaccacaatgtttctacatagccacgctagcaaacttgttatgaaatagtttaaactaggtgatgggtgatattggaactagggttcctcacatcgcaaacatggggcagcttggtgccatgacatccattccccgagctctaaagggtagcaccggtctgtcgtgatgatcatgcaccctgatggactcggttgaaagtgcggtccgatgaagactagcttcttgggggtcccgagcaagtcgtcccccgagcacccatcaaggccgtatccccgatctcttgggatgtgctgtctagagcatggttggccccaagcacctacggtctacctagcgccgcaagaaagtgctcaagagtcaaactgcttctaatggatttaatgtgttggagcgatgagtgtcgtccctcttggggcaagattacaaatatctacctgtccatgcatgcagcacaggggacatgatgaaccttatcatctatccgtcgaggaacgatgtggctggtaggcggtacggttcactttgtgaagtcgtctggcccaccacattttgcccactccacatggacaccgataggtggggccacggggcactgactatggatgacgacgccctcattaaatcaccctaaagctagtgggtaccaattgagggcacatggcaggtgctcacgccccttcccccttcggctctgctcgaaagaggaccacaacaatgagcataatgggcaagttgggatagcatgaaacccgaaggaagatgttgtcaggttaagctagatgtagtctatgacatgtacccttaacccatccctttggtacgatcattgtgcttccacctggattctataaggggagggactgaaaccatgagaaagggttggaaaattctaactggaacttaggcaaagaaatagcacacaacacacaggagttcggtattacacccctgagcggcctgaacctgtctaagttctccttgattatttcttttcccgttccgaggtagctcaaggtcttcctcccctagcctaactcaaaggggtcccatcgggtccctgctactggtgttcacccatcgatagcaaagacataatacttactccctccggttttaaattagttgacgcttggagcttggacactttggatgaaaaaacttgacgttttagcctcatgtgattattttagactgatttactcttgtatggctgcatgcatgcaaatcacatttagtgacttgatgcatcgagtcctgcacaacactgcatcctctcctacatcacattaacctgatgcatcgggacaagcagccacaaccactaggttaagaggatgtgattgttagatgtgccgtcctaatgtatttagtatgggtaaaacatgaatatgcaccctaactaactatttcttgatatgtgagatcctaccaaaaatatcaattaatttgaaaccggagggagtaagaattaataaggcggaaaaatcatgaaaagggactcgtaaacacttgcccccctccccccccacccccccaaaaaaaaatccttatttccaacaattgactatatagaccacagtgttgcacacacatgtaactcattgactttacgtttaattacactttggaaaaaaagggacaagaatagaaaatcggaagagctacaatattgaaaatggaggacatgatggctaaacagaaaatcacaccacaaggtttagctttgttttttttcgttttctttttttggctttgcttgctgcagcttcttaaagaacagagatgatcgccactaacccatggagactattccggtagttgacatatcttcagatttgatttggttgaaaattatatatatggctctacattcccgcatcctcccaaactacaaccttgtagtatttcatttcattaccttgtttatcttgtttatgctaaagtaaatgacctgccgacatagccattttctatttagttcaaatcttcagtataatatttgtttgaaactttctgtagaagtttctgataggattgcacacgatcaaactccaaattcagagtctatgttatatatatatgccggatataaacaaaacggaaggttaaacagagaggacaccatgaatgtaagccatatgatgtaccgagtaagatagtaagagtcaatttaagtttacctgcatatagcatgatttgtatatgatttgttagtgagagttgttgacagattaagtcgtcctgcatctcagttgattatgaaggtaagctaacattaggccaagtctgtaaaattactttaaatttcatgcattaaatttgacggactaattggccatgaaatttttttttctaaagattgattacttaattaacacaataaatttatattttcagaaataaacttcataaatatcttagaataagtgatctaaacaataaagaagcttttttttataaatatatatttagaagcgtagaacaaataatccataggaaaaatcttgaaaaaaagctttgaacaaactggtcacaaatagctcggaaaaagtgatctcctaacaccagttggttctgagatttaagacaagacaaggctaagctaggtgtttgctgtaaagttactctaaaatttgcacgctctaaaattgttttcaagttaagatccactatttggtttattgagaatttgagatagatagttatgatgtggtgctgagtgagtgttgacaaaaatttgtatctttagcaaacaaaagcagtagtgaacctaccagaatggttcaaaatcttaatttttttagacatagtgttcatagtttataaatgtctcagcctgcaagacagaaatatagtattactttctttgttctttaaaaggcaaaatcattaagaattctctgcaagtcaaaacatcaggagatgacgagactgatcaagttttgttttcttctaacaatgtttcagcctccattattcatttttctctcagaagtcaatccatcagaatactagcaataaatcaatgcaatgctgtgcactacctacatttgtcaacgtttgtaaggccaaaatgctacctatataaatgtcatggagttttgacccaacacaacacacacaagctaatcatctctttctctaatcagtccatcacctgagctgagcagcaaagcatctgagttgcagtgttcagttcgctaatccgattgcatttcggagagatggctgcaaggtgttcgatcgcgttcatgatcatggcgagctgcctgtccgtcgtcgtctccggtgggcttcccggcgatctcttcgcgctcagtgtcgcctcgaagctccgcgtcgaccgcaactcgacggcgagggcgtcgtcggacttcggccgcattgtggccgccgcgccggaggcggtgctccacccggccacgccggccgagatcgcggagctcgtccggttctcggcgtcgtcgccgtcgccgttccccgtggcgccgcgcgggcagggccactctgcccgcgggcagtcgctcgccccgggcggcgtcgtggtcgacatgcgcgcgctggcgtcgcgccgcggccgcgtcaacgtgtccgcgggcgcggcgccgtacgtggacgccggcggcgagcagctgtgggccgacgtcctccgcgcgacactggaacacggcctggcgccgcgcgtgtggacggactacctccgcatcaccgtcgccggcacgctctccaacgccggcatcggcggccaggcgttccggcacggcccgcagatcgccaacgtgctcgagcttgacgtcatcacaggtaatttactaactaatacaactcatcatcccctttaattagcaatctaattaacttgtactaatgaacattgttaacaacattaatcaaatgattaagcggctaatgaacactgttaacaatgattaatgcaggaacgggtgatatggtgacgtgctcaagggacaaggactcggacctgttcttcgcggtgctgggtgggctgggccagtttgggatcataacccgggctcgcattgggctcatgccggctccgaagcgggtgcgatgggtccggctcgcctactcggatgtggccacgttcactaaagaccaggagctgcttatatcaaaacgggctagcgaagccggcttcgactacgtcgaaggacaagtccagctcaaccggacactcaccgagggtcccaagtcgacgcccttcttctctagcagcgatattggcaggcttgctggacttgcctcgaagtctgtgtcaggagtgatctacgtaatcgaaggcaccatgtattacaatgagtcaaccagcaccactatggatcaggtatacaattatgatccatttgtgttcaatagataccatgtaaaagtactattgttatctatggcctcaaaggaaataatggatattttgttaatgatcaatgtattggtttccttgcagaaattggagtcaatactagggcagctaagctttgaggaaggcttcgtgttcacaaaggatgtgagatacgtgcaattccttgatcgtgtgagggaggaagaaagggtgctccgatcgatcggcatgtgggatgttccgcacccatggctaaacctcttcgtccctcgatcacgcatccttgactttgatgctggtgtgtttaagggtgtcttcgctggtgccaaccctgttggcgtcatcctcatgtatcccatgaatacgaatatgtgggatgactgtatgatggcagtggccagcgacgatgatgtgttctacgctgtggggttgctccgttctgcggcagttattggtgatgtggaacgcctagagaaagagaacgaggcggtgttggcattctgccataatgaggacatcgggtgcaagcagtatctgccatattacacatcacaagatgggtggcaacgccatttcggtgctaagtggagcagggttgccgatctaaaggcgaagtatgacccacacaggatattgtcaccaggacagaggattttctcatcaccagcatcaatggtggtggtgtctatgtagtcggtcaaatgataattttgaggtaaggaggagtatagataattaggtgtttagggatttagttttgaggtaacggagggtgaaaagcaagttaagttgcttgtgagaagctgaaatgctgataaaacccaaagaactctagaagagggattgcaacttgttcttagaagatatatgtagaaaaaaaaatctggatatggttgattcaattaggaggatgctgtaggttgtagttgccacgttatttttttttaggtttccttttgtttagcaaggcttgtaatgttacacacacgttaatgaaacgattcaaagggaacaaactaaggttgtttgaaatcattccgtgtagttttgacttttgagaaagatcatgaaatcattctgtgtagtttaatcttttgaaaaagaaagcttaactggatttggtgttggagtggcttttcaaattcctttcttgcattttactaatacaacatttttcatatgtggtgctgtagagtcacgcgttagtacaataacgcgcagccgttttcttgctggggcggacacgtatttctctctaaaggtgaagactcagaagtgggcgaacactcggcccagctggagaacatgctggctccggctccacgcacctgctgacacctttcgaagcactttcacgtgtgaaccgaagtcgtctttcaacttgagtctaggttctgtatgtcaatgtaagaggaattttatatatatatatatatatatatatatatatatatatatatatatatatatatatatatatactcatattttctgttacgccgtcttttttacaattaaacaactcattctagaataggcagatgtaataaggtaataaggcatcaactatatcaatcctacatgggctacatggcccttaatttcagcccatcttttgagcctagccttaacaatcaatccttggagggagtaagttcacataccgtccctcaattttacactgtgtttgtttgacatcacttatcctcagttctagaaatcttcgtccctaaacaatacaaaacagttcaatttaggtcctatagcagtatagatgcctggttttactgatgtggcatcctagtcagcaagaaaagattaaaaaaaagtatatgggacccacatgtaagtgagaaaaaaatgtagggtccacatcttcatttttccttctcttttctcttttcttttattctctttccttcttcagccgctgctgttgggaatctaccacggtgacgacgtgcaaaaggataagctccgtgagaggcggcggcggcgggcgagagcggcagtcgcatcttcctcctctcccgccggcacagcccgcaacctccccccctctcccgccagcctcttcccccctcttctctggctggcctcctcccctcttctcccaccgtcgccgccgccgcttcgctccactccgccgcccgcttccgtgcaaagagaaaacaaaagaagagaaaaaggaacatagaagaagaagaaaattttaaaaaaagaagtaaatggtggaaagaaggtatgcgggtcccacattttttctcacttacacgtgggcccagattgctgaggatgccacgtcagtgaaaccactcatatatactatcataggacgttgattgcacggttttaaacatttgaggggtgaagatttctggttttggggattaggaaggccatacacactcgacgtaaagttgagcgacggcaggtaaatggatgagtctcctgtgacgtaaagtcagagagactacacgtcagtgacccacatccctctgactttacgtcagaggagcgacatgcttggcaactctctaaggtggcatttgtttctactgaagataaacgatagaaaaagttgatagaaaaaaattagtacatgattaattaagttttgattattaaaaacttaagaaatagatttatctattattttaaagcaacttttatagaaaaatttcatacgatatgtaccgtttagcattataaaaaacatgctaatagaaatcaagataaaatatatatcttaatcagaaaaaagagatgagtactgggagtcttttttttataatggataaaaatctggctctatatccacatgtggatatacaccgccattttgttgttagataagcgaactaatagtaagattaggatgaatatttgatttttttttcaagtcccggtattttgtttgacatatagaagtggtgggaattggtagagagattaaatagagataagatctcaaggaaaaagaaatatacggttgaaatttatttggataatgcaaagaaggaattgtctttcaactctcagccccttatattaaggagggttccctcaatcgtcattctcatcgcaccaaaatcccacatccattaaccaaagaatcaaacgaaccaaacattagccgcatccctccaaactttactgtctttcttgtaaatatcacggtatattcacactaaaagatgaaaaaaaaatgaaaactaacatgagactgtgttaccttatcaatgggaggaacttccggctgagctgctagcttatgtgtagtacgtgtaattatatatcttaaaagaagattatgtgtactgtatatcacaaaaataattgatacatctgcattgcacttaaagtatgtggtagtatacaatatcctcttttaaaacctcgtaaaaaatttcctctctaagaaaataatattaactctattttacttgtagtttaaagggccgtcataataagaaatgtacatgttttatcattagatttttttaaatcacttgtaaaataatcaaattattaaaaatagctgcaagagagtatttttgtgatagatatatactaatgttatttccgcatttattcttttttatattagtgagtataatttcaagatttagccaaaaatctatttaaaacaacatctatctatatgaaaacatatccaatatttagcaccctccaaaggaaactactctccttttctaaccggtgagtagtttcttttccatatgaaaacaatccaatattctgtacattgcaatgggcccatctgacccagaataggccaggactgtggatcaagtttaaaccattggatcatccaatttattttattaaccaatcttaatttcttaattttgtttttatggggaggcagtggttacacttcacgcgacgtgtgcacaacgtggagaggagaggatggacactctgctttttagtagataagcatttataggatttaaattatatatataatataaagtatttaaaatttaaaacttaattttaatttatagttgatttaatggttttagttgcaatttgtttaccagcattggttttcacgacgttttaagtcgctaagaacaatatgtctaaaaggtttactcataagttattttcttattgttaataagcgttatgacttataatcagctgtacgccaagcgatgggctgctaaaaatatttatatttaggagaggagggtatatgtactagctagtggtacttctcagttcttatagagaaataaagggtggtataatgatattgccatgtgggatgaaggcatcaaaaggtacaaaataaaatgtccaaatgcatggatacacaagtttctgacatgctcatggcgtacccctggcttgtacagtatcaggtaaggtccctactacgtactagccatgttcgaatgatcgatggtaatcattcataaccatttagtctcgtctagttggtagaccacttaacctcaaatctttttgtccactaagctattaaaaatgatctcactttactccctcatgatatttgtatatttgtctctttttacatatggcatattttaaattgaaaatatatgagatatgatagggagcattatatatacctcatgccttagatttttcttgaaattttttatcactatttgcataggttagaagcaattgggattgattcaaaaatcaggatttataactgaatggaaactttcatagagaaattagaagtatttttcacaggttatattgttatggttctaaaaaaataaacatatttgtataaagagtaaaaaaggaaacatagagaaggaaaatattgttcagcgtaaattaaagaagccgaaaaatgctatggaaggttaagtgtgataaaatggtaaattggcattgtagctcaacacgatcttttgctaattactatacctatatatgtaacttctatatagatggtatccattgtaccaattattagaaggtaaagcgcaacatgtaaatataccgcatcattatctactagcaattactatacaaagcatcttaattcacatgcaggcatgacacatttaaaatatcatattatatagttgaacatatataagtatgttaaatcatctttcttacattatttttcacaatattttaacatttactatttctataatatttagcatatatattcattcatttcatagtaaagcacaatgtatcacccaattactatcttataagatgcattaaataattttcggattggattggctacaaattgtgtcgtttgttttcaaatcctatatcactactatgaaaacgatttccgtagatgagatcctttttttctttccttggcgggtatgttttttggcatcataggtgaatgggggacggggggcgagaatttttggcaccatagaccatttttgaccacctagaaaaaatagtttttctagtagtgtatgatgctcggattaggccaccagcaccggctaatttaccatgtggtctatttggcctagatctaagatttaggaagagaagaacataatgtaaaatcttttctgcgcacttatgtttttctaagaatatacaaataccgcaagaccccacaaactatacatgactcttctctgttcattatatgtgatttctattaatctcccaacaatcgttacatggtacatatatattttctagttatactagttatacatacgttggtagttaatatcgattctctacgttattactatcagtgtggtgacctatgtatcagcgagcaatacgccaataccacgggtatagtgtagtagtactgcagaggacctcatctggtttggttttcgactacagtgtcctgtccgggccccggctggctttagcatgaaatgccaagatgctacatgcagccctgcagccatttggggccctgctgctgccaagatgccacctcggccccggtcgaaaaaccacacaatgacatactcatctttttcccttcgccacatcgcatctctcatcttatcttagctttttgttggtacttccgatatcatttcttcctgtgaataatttttttagtatcattatttgtgttgccaaaattaacataggttggtttagcatgcattgggtaggtatttgggtagtactaatccatgatgtcaaatcttgcgaaagggcctgtagcctagtggttacaagagactcagtagcacctgaggtcctaggtttgactccccatgggagcaaatttttcaggatttaacggcgttgtgctttcagtggtagacgacgtacccgtcgacagcaaggcgcatgtggtgacttcgtcaatctctccagaatttgctttattagggggtgaatgcgcgtgtgttgtgagtgtctgcgttgtactgtgtaattctaaaaaaaaaatccactacctgtttacagattgtccagagttaaaaggacccttttaatttgttgtgtggtaaacttttgcagtttcgctagagtggcctgcattggatgctgcgctgcgtggctggtgggcagcgcactcgtccgtgaaccaccaaaagatcttttcttttgtttttttacactaccgtaaagccacgaagagaaggtggggtactggtttttgttggagaaattaattcttcccttaattaattagattagtttaagattaattttttgtttcgagaaacacggtataaacataaacgcttacacaacacacgcacactcacccctctataaacacacacgtatgcaatatttctatgagcacctacgaaaaactgagctgacatatattgagattgtcaaagtcatcactgatatctcgctgtccataattatgtcatatatcactgaaaaaataattagccgtaaaaataaacacccttatcaagtctaggatttaaacgtacttcttatatatgcctatttaattaaagtttgcaatacatattgtatacagttactaatctatttggtgcgaggttggacttcgattatggtcaaatgagacgaattggaccaaaatttgatatagcaaaacctctcttaattagtcttgccaaaacacgtataatcctatctatctataaagttacaaaacagttacaaaacactatatcctataactcaacacgcacatatatcacatcatcattcactaataattattacattttaaacctcatggaagcatgctatattatttatataatttattaaattttagagctttaaaatacaagcatatatttaaatcatcatcccacataattcacataatatttcaatatatatcttcagcattgtttacaatatcacatacctatattcagataatattcactactacagaaaggcatatacaagtcacacgaaacatctaaaaccgacacctatagtgctttttccaccttcgcgggctgacaacatttatactccctccgtactcgtaaaggaagtcatttaggacagcgacgcggtcttcaaaacacaactttaacttcttgtttctataaaaatatttatttaaaagtgatatatgtatacttttatgaaagtatttttcaagacaaatatattcatataatttttaccttttcaaactcaataactttgagagttatttatgatttatattcccaaggtttgacttaaacattgtactaaacgacttcctttacgagtatggagggagtatgtgccagttcttttaaaaacactgtaccttaaatataatatattatatgaaaaaacgacacctataccaaacctagccaaacaggcaaaccgagtacctgaccttatccactcgcccacacctgcctcggtctctttctctcccatacttctctctctctctctctctgtgtctcatgtggcggcgggcggcagcctagcggaggtggcggtcgcaccctcccctctgctagatccgatgggagggggtggcgacgaccgcgccctctcctccgctagatccagcgggaggagagacggtggcggccttcgatggcgggaggggaggcggcgacggctacaacgggaggagagaaggaggctcgcccctcctcctcttctcctcttcatccggcaaccgtggcaagggtggagtaggacgtcggccctatgtgtatcctcgtcaggcagtagtccatcgaagcttcagcgtcttgttcttgatgttcatattgatgtgttcttggatgttgttgatgttcatgtgttctttgatctggtcggggtgaaggggagatgctcgatgcatcagctcgattcgagttgatgcacgagccactttctttttggattcttgagacctcaaaggtgccggttctagaactggcccctttgatttctctcagcagtgtcgccttctccaaccgacacctatgtggggtttccaaccagcatctatttgtgtttatgtagtagtgatttcaatatatatcttcatcattttttttacaatatcatacctatatagttcatcatcacttaattaatgttatttctttcttatctcatcaagccatatcaccttaattatttttggcctttaaataattaatctatggtccgaatctttttctctctcataaagacacaccatcttattttttatatttggatcatcatgctagttaaattctcgtaaaccacgttaacttatataagcttatgccgtttagctatcttaaatattatttctacttattatcatatagaacttccgcaacaatgcatgtgaggtttcatgtagtccgtgcatgtgaaacacctagaaaataaaaatcaattacacacatcataataaaatggcaaaaattatacaataactagtgctgttatttcacagaactggtactgtactaagctcgatacggttaatacgatattgttgtactccgtaacagacaaaaaaaaaacaaacaaaatatcgtattatcatgcgtgcagtttacagtatcgtacgtacatgtgtgcatgttgcaggatactcctggcactttgccggcagtgtccgactcctatactgtcccttctgctgcatgagctgtcatgcatgctactattctcgtctcaaaacataacaatataaaactgaatgaaatatattgtgtacagttcaacaaattttgactaaaataaattttaaccagttttagttgctatattttgaaacagagactattacttcctccgtttcacaatataggtcattctagcatttcccacattcatattggtattaataaatctagataaatatatatgtctagattcattaatatcagtatgaacgtaaaaaatgttaaattgacttatattgtgaaacggatggagtaacttttacttagggctgcttttagcttttactgatccgggcacgcaaggtacggtactcctacatatatgggtagcagttcggtacggtatattagctaggctaagcttgtgcatgaaagtaattaatgaattgtttatgcatgcagttaagtaaagaaaaataggattaattcttcttcagccattcagggtgcatgagctagctctaccttttgtcttacaaaattatattcgttttgtgttgtatgtatctttttattcttatacacgcagacgtagacacccatacacaattacacacgcaacaccacatataccctcaaatctgccttttaacatacatttaaagagacgggaactagcagccgtcacacatgatttcactaaaatcctacattgctcacttgcatgtgcatatataatatttctttgtgcctttaatttcttgtgtttttcttgtgtaaactccaaacaatttgaacattcttgcattcttataaaaaaaaccataactgcatacggcctgatacatgacttttttgtattttccctagctaccaatctttttcacttcttttttcttttttgcatccgagcggatatatgtttaatttgtttcatcatctttttcacttcttttttctttttttgcatccgagcggatatatgtttaatttgtttcattgttgtttactagtaatatatagatattttaaggcatgtcttttttactgaaaacgttacacatctgttcgtcatgttggttaattagaaacggaacacacaagcaattgctactttctggattaacttattgttatctaacgatattgtttgaatacattgatgtaaataacacgtacctacagctaatatggtagctggtattgtatattgtccatcagacatctatgtatggacgtactgtaattgtagcaaaagtttgtatgtactatagtatatataggacacacatttccaaaatcaaagggttcactacggactagcctcactgccacacacatgcatgcatatatagctgacacgatagagagaatgtttgtctcccaaaaaaagtgagaaggccagcttttgacaactgacagagatcatatatatacataagctagctgacatatgtaacagcaagaacaagtcatgcatccatgaacgacacccaatgaatagtagaagtacacctacagtacgatctgctagtttcactacatccgattctctccaatctccatattattattagctccaaacataacagatacaagaagaaagaactaagaaacatgatacaaaagtggcttgattaattagcagcagtagggggtaataaaaaaaaacctcaagctaatcactcagctgatagtaaatataatcctgatcccggctagtagctagctagcgagtttgttctcgtttatttcgtccttagacatgtgatcactatctctccttcatcctgatctagtgatctcctcaacaacacaaaacaacaaaagatcacaaggcacacacaaaatattgctagtagtggtacatagtactctggttgttgccctcatcaaattaacggtactagtagctagctagttttgatcagctagctagctagctgtggacgaggccacaggatagggtcatgagcagcatggcggcgtcggtgatctcgtcgcgagggaggccgtggaagaacgccggagaggcggcggcggcagcggcggtcgccgccgccttggatatcgggttctgtgccggcatggaggtggcggcggcgttctcgccaccgacgacgatgacgtgatcttggtccttcggagcggcggccactacttctccagcagccgtgggcttggtggcagcgacggcagcagcaacgtgatcgaccatcttgcaccgtttcttgaacggcagcgaccggtcgacgtccgccgccctcttctccttcttcgccgccggcttattgttcaccggcgccgcggccacgctctttgccggcgccaccgccgctccgccgttggcagcagcggccatcgcccgccgcgccttcctttgcctgatgccacacgcgttgcaaagggactgcaccatatgcatagcacaacacacaatttaaaccaaggaaatcaacaatctttaacatatgcatgatgatctggtgtaacaaaacaaagagaaaatgcacatagtaaggtagcatatagcacccagacagacagatcaacacatgagtttgggcagttgttaataggggtgtaagagcaagtaaatctcaccttggggccacaaggaccacttctccacaagggggtcttggtggtgttgcagtccgagcacactctaacgacacccaaagcttgctgcagttgttgctggctctcatcctggtgcgcttgtgctcttctccttggctttctcaccgccccgccctcaggatcggttgccgcccccttccttatgatcctcatcttcattggcggcgtcgacatccacttgctggttgatccattggcatgctgcttgttgttactctcgatatcgtatggatcataagatgatcgctggatcatgtcgctgccgatgctttggatggttggtcggaacggagacggtgtgaggaagacatctgatccgcccatcatcatgtgatcattgaactgcaagagcaaaaaaaagagaaaaagaagaggagtataagctaaaattattagggcaagcagcatatatactaagaaagaagcactgatctacatgtgtataagtagctagcttgttctacacatgtatgtgatcgatcccctcacctgttgattggattcacccaaaacctgctgcctcctcaagccctgatctccatagatttgcccttggtgctcgacggcgctgtcgatcatgaaagggaacaagataggagggtcctttgctctatggaaggctgggtagagcccctgatcctgatccccctccattagagggagagtagcaggtagctggctcatgtagatagtagacatatcagagaggaggaggaggaaagagatgggagagaagctatagcttagctgaggagatctgggaattatattggtgtagcttcaggcagtacaaacaactgtatcagggatattgcatataaggaagatagagatgtggagaggagagtagtgtggctgcctaggggccggaggatctgctgttggaggggcaatttacaagggcccaggggatgatcatggacagtggagagaggcatgtccttttaataaaagggaagcaagaggagccaagagctgccatcaatccctctccagctcgggcctaggaagatttagaaggatgccatgtgtgtgatccctttcctgagaaagagggcgaacacagttagcacaggaaaaccaaaggcaaacagtggggaaaaaaaaaacacactgcgcactgtacaacatgcaaaacattcattccaaaacaacaaccaattaagatctcatgcatgcagctgcaggcagtagcagcgtgtgccctacctggcgcagcagtattcatcgttttctacaaaagtattttgcctgttatctcaagaccgtgatgcaggatgattgcagcgttgcatacatcatgcactatatatatgttccaaaatctcatccaacggctcatgtgacgagtaagcaaattaattagcacccatgatagagtatatgtttgcacaatggcactagacatatatttcccatgtataaacagcttagcaccttaatgtaggtaatattaatttcctaatgaaatattgcatggcacgctctgcatatataaagtgtttggatctgtgggtttcgactgtgaaacaaacagacatacatacatatattctaaactctcaaggagacacccctcgttatttgcacgccatctaaatggttatgaaaaaaattaaaaaaattaacaagatagattattatatggtaaatcactccacaatcatgcaagatcaaatttaatttctataagttgtaacgtaaaaaataaatttgactatgaatacacgttaactagccatagtttagtttgtttttttgttgcaacttgtaaaagttgaattttaatttgtatgtttgtggagtgatctatcacatattaatctatctagttgatttttttcataatcatttgaatgatatgcaaataacaagggataatcccctcgagagtttagaatccactcctatatatatgtggtattggaagtacaataggcgtcatgatttcctcaaaaacacgatcaaagagaaaacaaggcatagaatttcactaaaccagggaaattcaacaattatatctatagcttttgatttcgagtaatattattaatttaagagtatcagttgggatatatttgaccaaatttgcttccaattcaaagattaacttgtaatattagatatcgtgaagtgagagtagctcaactggttaggttctttgtggtggaaccagcccacccaagttcaaaaactagatttgacacggtgttcgcaacggcttattattctttcagtggtaggcgatgtacccatcaacaacaaggcatatgtggtgacttcgtcaatctcaagaaatgtcggcccagtctttctgaggtgctctgccttcgtcaatctcaagaaatgtgcgttcatagggtgactgtacgtgcgttgtgggcgcttgcatttatactgtgtttcttaagaaaaaaaatgagatatcgacatgttctctaatacaccaatataaaccccccaaaaaaagaaaaagtatgtcccgcaaaacaagtgattccgtgttcatacaacaaattaaccttcttttacaaaattgatcacacttttgaaaacatttattattttaagaacagagggagtttaatctcccttgtttggctccaaaattaatttatcaataaattatgtattaaatactctctctggttatagtgacattttggatgcatgtcagcatggtcccaatacaaccttaatgctctattcataaaatatattaaatattgacatattattttgtgaaagcacttttgaaagccatccacacatcaattaagtgtaccaattctcctggtgtgcagggctgtctttgtgacactgctttgtatatacccctgtaaatccagccccctgttttctattcttctcttttgttttgtctattttgtttttcctgttttcccttttttctgctccctctaccccctctgctacactcataacttgtaacctataaacctcatttctcttaatgaaatgactataaggtagggcatgctctaccttcttgcgtcaaaaaaaatttagtgtgccaaatctgaaacttataaatatgcctatagccacattattgccttttgtgactaggcgtagctaattaccagcaaaatcaaaacctcactgcaagttgagcaagaaatgtatgatcaaacaaacaagtcgtgcacatcatcatcattattattattattattattattattattattattattattattattattattattattattattattattagttcgaagatgcatagatttaattagcatcacatgaaggagttgtttttacgggaatatatataaatgcgttccctgtatgaactacatgaaagtttacatgcaagtagcttgtagatcagctggcaaatcctaccctacaccatccaaatcctgctactgcacgagcacattcgagtaactaataattaattgcacgactaatagtctaatcagcaatcattgactgcgaacctatgtaaataactgtatattgtgacatgatcacatctactccctccatcccataaaaaaccaatttaaaatgagatgtaacgttttctagtacaatgaatctaaacagaggtatgtccagattcattgtactaaaaaaaatcacatcatatcctaggttggttttcgtggaatagatggagtagctagctagggctactacctagttaactaactctcacatgccatgcatctgttagtacatgcagtacatgcacgtttcccagcactgtagtataaacgacagatcggttgaacaaaagctggagccattcagcagggaggcctgcctgtgtaaaatcgggtgaagaatcagtgcagtggctctaatagataggtttgcatgaagaagccattagccatccctctctctctctggttttctctctcacacagtcacacacgcactggagacaaagaaacattaagacatgagcaggcaatgagacacttcctgcgccaagggccccaggcccatatgcaagcatggtttttggatttagcggcagaagcaaatgtaacaggggtagttttgcctctagccaagagctaacaccggcagtacgaaattaatcatagtatcatacgaaattatatcagataattttctggcggcagtaggaggccgagagagagattaccttaatgaaatatgccaagtacggaggatcaaattccaagagtttcagcacagctaaaatatatgatatatatatatatatatatatatatatatatatatatatccccagagcctacagcaacatcaacaagacatttataccatcatcagttcaaagattaaaaatatactactgtttaggcaaaatatttttacctgctctgatttgtgatgaacagagtcgacctaggtccatgaaagggcaaatcttttccacgactcagaacaggatatactgactgcatgatctcatcatactgttacatacgctagccaatctacggcctgcctgctgactattcaaccagtctttatcatcacttgggagaggtcgagggactaaaataaagccaaagctgcaataaacatggcacacatccctctaatgcgcaaccaaaatctcacttattgcccatgagcaagagagaggaggagcagaaacagcttaaaccctgaaagcgacggctcttcccacatgacaagcccacacacttccattggcaagggtccaaaatctgggcaacttgttcctccccctctcgtgatcccgttggggacaaagctcagcgaggagcgctcccaaacaagcaactaatggagcagattttggggctggcagcgcagcgcgcccactgcgcgcgcctccgtacgtacgcggtatatatgcgtacaaaggagacagaggtcgacaacgaaaacgcccgtttggcgagatcgttgatcgatcaacctacaatggagagcagagagaatcagtgatcatcaaagatagcaataggagtaggacacgtgtcgcgtaggcatttcccagagtgcatcgagatcggtgacgcacctctgagctgtgtgggaagaaggatactgatgaagtaggagagagctgggactggagctcttttggtattttggagaagctagcacctgggtttgtaccatctcgacgaaatgacgagcagatctctgcactgaacttttcgcctcggtttgcgcaataatctgtcaggcatggttcagttgtgaatcgtcatatcctcagacagaatgcagaagttgtcttcgtgacattggatctagaccctttatgatttatccggagtaatccctcctgcataaataaagatactgcaagaagagtgcagctataagtcagcacagaaatttgagattgataaggtggtatatgttatcaataattaagcatctaaatgaatttgtcacaatcttatctcaagaagtgaccaaatgatcccccatactaccgcaaacagtactgtccttgcctcatcattgtgtaatgagccattttgttatgcatgatgcaatatcattcgaagtgcttgagcaatactgaaggagattgaatctaaatttaacatctactccatatatctaaatttaacatctactgaaggatcaaactcttatggtaaaggctgcagctgtgacatcattcgtttacttatgctgacagtccatgtgcttaagctacagtagtagcaataatgtaagagcgtgtttctgttaagacatgcatgctatattctccaaacgtaacggaagcaagaaagagatctcagctatagaatagatctactagaaaatgactggttatcctcaaaacatcacacaacaccataagatacttctgtctcgctcaagatgtccggtgaaatattggaaaagtatgccacaaaataaaagttaaaaatagcatgtagccaaacgacagcttttcgctaatacggtactagagagaggccgtatatatatgttcacagataattacatgaaaacttcaggccacactaccaaattcttatcgtaccactcgtatagctggataatgttcactttgatagacagccagcttctagtttgtatgatggttaagatgtatacgtatgagccttttgaatcactccttgagcaagagtgtctgtgagaataaattcactcactgtcacaagatgtaaggtgcccagctcaatgatagacttgtggccaacaaaaatgtagctttcacaaggctcttgcaaatccaacgggatcatggctttgtgcaaaaagacacaatacgctccatgcctacgtggaccctcatgtgtgtgtgggatcatgatacacacaaatgagagggtttatgtatatacatgcacttcatcattactaaataataagaaagaaaacagaacgctacagtgttcagctttgaagggttgctgccagtctagcaatgaatttcatgaagaatatcagaagatgtactgttgctaaacataaaatgttcccaaatactccagcaaaaaatgattctctgttagctctaaatactcagttaacagaatcatggtaaaaccaggggtagaaatgaggaaagggaaataaaaaggagtcagaaaataaaatctaaatagtaatcttgagtgaagaagctgaggtgttcataccagagtgcaggctaaagtacaaaaacccaactgagaggtgttcatggtgaattaggcttatcagtggcacccaagtgaataaaatgttctatacacaacaggcattgccaagaatcacttcttttttccaatcttgcaaacttctcttcattaggacaaagaaaggcctagatatttgagaaaagttgcgctgcagtctccaattgtcaaacatcttctaggagtaggcaataccaagtttatcatcaagaaaaaggaggcctgcaatgacacttacaggaataatatcagaaatgtagtaactgctagtaaacatgtaaatcaatgaatcacaatagtacaaaaaataagagatggaatagttcagatatgatcataatttgatttaattttttaaaagtatacctatgataatataataagacaaatatgtgattaccaagcaatgcaataagtggctctgcgcagcacacagccataacgagccgttgctattaaagaaacaacaaaaagacagaaaacaaagaatacactaattgagaggaattggataaggtaacctaggggtgtgatgaagggctgagccacaaccacttatttttcggcttaatgtcactccacatgattttgagattatgctacgagtgaatgatgcaccaggtaatttttcaaaactaggggtaaaaagggaaatgagggtttaccaaatcaaggatggaaactatgggcttgtttggggaagcttctagttgttatagcttctcccagaatcataagctcccctaaacagtccagcttttggtccaaattctgagaaactgtagttgtagaatccaggaaatgaactagaagccagaagctgggaaacccagcttttccagattctcagaagctggatactaatcagctgcttattagaatcttaagctcccccaaacaggccctataatattgttcccacttattttgtaagtctcctactttgatacaacagaagcacacaatatcagaacaatcataagatttgatctgttgaggcaccaattttttttggttcactgcacgttcctggaactctaatgtgatgcctcaccattaaaatttccacctctaattttttttttgtaaattaagctataatagtttacataataactaagaaagcataaaaaaaataacatgccatatgcaaatagttgaatggatggattatgttcagagctcagctgggagaacattcctgatgtgctacctctcgctatgtttccatcacatcattgaatttcatttatatgaagaaagaaaacaacacagcgtatgcagcaactacatgtactttctctctcatgcttaaatcttgcaatcatgtctcaaaaataattgtgaatgtttgtaccatgcaacaacaaaataaaggtgtatccaggaaagtttgaaaagaaacatatgacattgacaagtcaagacaatggactagctaatggataggatggggagaatcgtctgggtacggatttcttaacatatgaatgtgatgatagtaagtgtatattgtataagtatattttctgatgccaggtaatctataaagtgttctattttggtgcttcttttttgttttttgtttaaagcagacatgaacactagcatgtctgtgcgaccatatctcaatcgggtgaaacttcggcccgattgagattacttccttgtgacggcctgctaattccaggcatgttaggggccgtcacagatggaaggatctgtactagtgactaccagattccaaggcagaggtcttatgttcctatttttctgtaaagaatatacacataccccccccccccccaccttcctcccttaacatttcaacattaggaacaaagctgcacaagccgctttcacttgacggaacttgctcaggctgtttgatcctacacgcagagttataagcttttaattagatgttattctaagctatgagaatgacccatctagatcctttttgtatgttcaataaaggtgcagcctacatatatctaaagaaaaatgtcacacgaaagggtttgtattggttaacagctatttaagcttatggtacagcagctgcagacttctctgagttcagatagacaaacaataatctaatcttaacacatagagccacatttcttaaagtatttaacaaaaaatatggttgaatcaaaggtacggaaaacatgcttgaactattgcatcagattaaaactagtgacctgaaagaatctaaataattttgacacaagccttacctgtagttcaaggtatacactacaggtgaagttaagattgattttcatctcactgtaggtccaactttttttactataatacttgcaaaaaaaagaaagaaagatttggccttccctctcaaaatcttcacaaacacataaaacttcaacttgaaagcgcggcagagcgcacttagctttcagaaatcagaattatgcgacgtccttaatacgacacaatatgctgatgcttacgaatattgcagcaaggcacaagagaatacatgaatgaaactacatcaatctaagaataaagaacaaccattgtgtccagtttccagttgcacccaccgccaccatatattgtggtagaaacagtcactaggcaaggtatatctctaccgtctctgttggtctcatttggcacttggacccgtcaaatatagaatatgatactataaaaactattaagaggcatcataagcaaactgtcactatcttttaatcaacagtcatatcgctccaatccagttacttaagcacatatggccaggaccaaaccacaatgccagtgagaccttgactaaaatcatgatccctaactttataccggtgcaaataagccgtaaatggtaaaaatgccgaaagaaacgccgaattttctgcactaactaaggcaccgccggatgcttctccgaccaccacatccacagccgaacccaagatcagggacgcacagaaacctctacaagctcatatagctcaacacccagcgtcgccacacgcaagaaaggtaccagaccacaaatcttggccgggggcgcatttcgccgaacatgtggtgagcgacgacgcagcgtcgcagggcaaatcacgccagcgcttccatctcaccagccaacacaaaaacccagggtctaggagcggaagacgatgagaaggccgcgtatacctgcaacaactcatctccgcccgccgccggcgacgccgccgcgccgccgcgtcgccgcgcccagagagcacagcccaacccgacgccgtgggagaagcaataataataaactaatcagcacaaaaaaaaaagcagaaaagaaaaaaaataaaggatcgttacgactggaaggcccaacaagaaaggactaaggcccatttcagcccaacatataaagcgaaggcatgaggcccgttacagcccaacaggctcgactgaagaggcccagacgaatggcctcggctacggagatgccgagcctgatctgcgccgttcgatccctcatcggacggtcaggatcactcgcgcggcaaccctaggcgagattgcgaggcgggcgccgccgcctccataagtaggcggcgccgaatccctcgtcggctgctgctacttccactagggtttcgtcttgcttctcccgctgctcgcctcgcctcctcgacggtaagatctccccgatttgcaacagctattgtgctcgcgcgattattgcttgttgcgaatcttgtttttgcggagttctttgatacatatgtaaaattttgtggtttcctcatgacgtgcagatctgagatcatcgagatcgattgagtggagctaggcggcggctagggcgagatggcgctcgtaagtgtgatctatccatgttacctgttcatgcttatcacgtgttgctacttgtgcgaattggtttgatttgtggggattaatagtgggaaagcttggcctgatgcggtggggggtttggttgttcatttcaaattatagcttgtgcgggttgttgtatagtctgctatgagaaaatctttttttctgcatgatcagggttgatttgatgcgcattgctacccagtgtttcgatctaggaagggtttttgtagggtgttgacaatttaggtgttcaggatttgacttggatcgttgacaatgttcggttatgtctagcatctctgattttcttcatgctggcttgcgagctcgttgatatcaatgatttctggtgttcttttactgttactttctggttcaagtgctggtggttgaagaagatttatggtgttctttactttgttactctctgcttctaatgctagtggatggagtgaattacttaatttgtagtaaggagctatgattttttttctgcactgtcatttttttctgattatctcattggataccaagtgttgcactattgccaaagtaagttcgtattcaatgcaagtaaatgagtgcccagtgtcatgccggcttgttaacattatactcgttatcctgcatagacatgcacagggttgatttcctagaacgcttagagctttttgtttgatgcaaatggattcatttacagtttccaaaatgtgttttatttgctttcagaatatctgatctcacgttgaccttatgtagctcagcacttctgcacataattatataattatttgcattgattatcgctatgcacaacattggaagctaaagttactttgtaatatatgcttcttgatctgtgaattggttcctctgcttgtatcgtttttgtttatcatgcttgtgtctccaaccttatgtacattattcgtctgtgattaggtattgcatgctggcagtggaaacaagaatgcattcaaggcactcattgctgccgagtactctggtgtcaaggttgagttggtgaagaactttcagatgggtgtctccaacaagacacctgagtttctcaagatgaatcctattgggaaggtttgaacaaaaaccatccctgtattttggtacattcgcacagaatcttatttggacacgttttctttcagattcctgttctagagactcctgatggtcctgtttttgagagcaatgcgattgcacgatatggtaagtgatacatagcaaggaattggagttctcttaatctttttctatcatatctgatttagttctaagtcactgtcattttcctgaagttacccgctcgaaggctgacaacccactctatgggtcttcactgattgaatatgtgagtggtcttccatagatatttaagatcattcttgattattttacgagcttctagaattgtatgtttcttccaggcccacatcgagcagtggaatgacttttcggccacagaggttgatgctaatattggaaaatggctctacccacggctaggaattgctccctatgttgctgtggtaagtatggtcaagtgggtgtcatagtgttttccttgtgtcagcaatttgttgtctaatcttatttctgcccaacagagtgaggaagcagctattgctgctttgaagagatcattgggtgccctcaacacacaccttgcatcaaacacataccttgttggccattcggtgactcttgctgatattgtgatgacctgtaacctctacatgggctttgctcggatcatgaccaagagttttacttctgagttccctcatgttgagaggtacttctggaccatggttaatcagccaaactttaagaaagtcttgggtgatgtgaagcaggcagagtctgtcccaccagttcaaaagaaggctccaccaccaaaggagcagaagccaaaggaagccaagaaagaggctccaaaacctaaggcagttgagaaaccagaggaggaagaggaggcaccaaagccaaagccaaagaaccctcttgatttgctccctccaagcaagatgatccttgatgagtggaagaggttatactcaaacacaaaaacaaatttccgtgaggttgctatcaagggtaagtttcttttgggaatctagtagtcactaaaaggtttccacgtagaaaagtatagtttctttcgggaatctagtagtcactaaaaaggtttccacagagaaaagtttactacattgctgtgagtacactagaaagatatgagtacaaattggcttacaaattataacagctactaaagagtcaatgcaaatttgtttgttgacctgtcaactgttagcaagttatatctctttgattaccattatttgtcatctgctcccaacttctgttgtgtatgaagttctgtgaattgaactcaacatgtcttctcacttattgcaggtttctgggatatgtatgacccagaaggttactccctgtggttttgtgactacaaatacaatgacgagaacactgtgtccttcgtgaccatgaacaaggttggtgggttcctgcagcgaatggacctgtgccgcaaatatgctttcgggaagatgcttgtgatcggctctgagccgccattcaaggtgaagggtctttggctcttccgtggccccgagatccccaagttcgtcatggatgaagtctatgacatggagctctatgagtggaccaaggttgacatctcagatgaggcccagaaggagcgcgtcagcgccatgattgaggacctggagccatttgagggcgagtcgttgctggatgcgaaatgcttcaagtgaggcgtcgttggagcaaggataccgtggaaaatgagctatttaggttttggatttacccttctacaatagttcatgattatgaaaaaaaaaatactatcaccatgtggctatattagtcaatattgagtgtgctggtcttttctttttgtactgtttgctagagttttggccctttttaaccttgtagttaagttgttaagacacttatccatcgaatcatcgtcagaaacacaccattcgaatctgctgttgctcatgtgttaaacttgccattctgataatgttttggaaataggcaacaaaacgagttatggtgctgggttattttatgtattttattctgttgttcatgtttgttgtgtttcttttttttttcttttgctttcagcgctgggcacgcagacgaaggccatgttcgtttctattgagattttcttgattatctggtttggtgatggctatttgagggtatataaatgaatgaatgaacgaattactattaatttaaaattttgctttagaaaaatatttccaagaaacttctattatatagaaattttttacatgaaaagcatagcttggtaagccggataataatctcctgaatcaaaaatgggatctacaacgcatggatcagagatttgcgttttgtcaatgtgtcaacttgcctaagcatttgcggagtaaatttagtgacgttaaagaaagaaagggaaggaaggagaaacaactacggatgacaacggtttagggtttagagttaatgtggaagaaatagagggaatgaaggagaaatatcgttgctatgcatgacaacggctcctcagagtcaagtgaaagaaagagagggacgcatgacatgacaacggctcctcagagtcacgtgaaagaaagagatggaaggaaggaaaaacatcgttgatacgcatgacaacggctcagagtcgactcttagcattcattaacgaaaagtttgttgcatgagagtggagaaaaatgaaagaagtataataaaaatttatttatacattaatggtttagaaaacttattgtctttattactttagtacttcctccgtttactttctaacattgctaatattcatatatatgttaatgaatctaaacatatatgtgtgcctagattcactaacatctatatgaatgtgaagaatgctagaaagtcttataacctgaaacggaggtagtaggatatagtctctagtaatattaattaatataaagagctcatattagactctacctttatacatgccttgaaattaactcacagcatcaccaccatgcgaacattaaatcctccttactccatttcgtattctataatactatctccttccccttaataacgttggtccttactccactcagtattctgtaatactaatctccttccccttaataactttggttagtttaattttgagtaaattttagggtgtttggttgtagtcacagttgtggcaagattctcttccaataaacgagtcatatacgttattgactcaaaaatgtgttgcaagattttcttaggcttgctaaagtgtgaccaagaatttgatcgcctcacttagacaagtgtggcaatacttttgtatgtagttttatgataaattaacctatatatatataattttctaaaatttatttaatttttttatgggaaagaaatggatttaattttttttagaaaaaatgcccaaggcccgtttcgatccaacgggctcgactggaaggggccagagtgccagacgaatgcccgcctacggagtggttggatctgctctgcgccgtccgatctgtcgcaaggcttactcatcggacggccgagatcacccgcgcgcaaccctaggcgagatcgtaagtagaatcggctgcgtcgaatccctccactgtttttgctgccgctgctacttcttccactagggttcgtcttgctgctccctccactgctcgcctcgcctccgccaccgtaagatctccccgattcgctacaactaactagtgtgcttgcgccattgttgcgtactgttgattttgcggatttttttttaaatttttttggatttttgtttcctcatgatgtgcagatctgaaatcgagtgagtgggagctaaggcggcggccccgtcgagatggcgctcgtaagtgattcttgatctaacctcgtttgctcgtgttctttagttgatttagtggagaagcttggcatgatgcggtggggtgtagttttttttttttcattttcaaattgtagcatctgtggattgctgtatgagtcttctgtaaagcatatcgtttttttctgcacgatcagggttgatttggtgcgcatttctacccagcatttagggagggttttggtagggtggtgacagtttaggtgtcacggattttatttagatcggtggacaatgttcggtctatgtctagcatctcttatttacttaatgttgtcttgcaagctcgttgaaatgcagatttctggtttttttttttactttgttactttctggttcaaatgctggcggatcaagtgaatattaaataatttgtgcagtgaggaagcaaggacctgccttcgaaatttttctagtctatatttctgattatttgatcccaagtgttaaagattgttgccaaggttttccaatagttagcctttcttatatacatttgatgatgtaagaccaaattcaaatgcatacaaatgaaagcctgatcacatgacagtttgttgacaatatatacattatcctgtagagattcgcacagggctctgctttcctagaatgcttacagcttcctgtttgatgcaaatgggattatttggagtttcggaaatgaagtcttattcgctttctgaatagccgatgagcatgtagacatgtctcatgcagacattatagctcagcacttgtgcacataattatataatatgtatgtattgaccatcactctgtagaacattgaatggctaaagtcactgtgtaatatgtgctgcttgatctatgaatttgtcccgttgtttgtatattttttgtttatcatgtttgtgtatccatccttatggacatgctagtcaaactgtccttgtagtgttgtcatgtcatgcacttccctaacctattttcacgctcaactttgtaacttgcattggtgtaggtattgcatactttcgatggaaacaagaatgcattcaaggcactcattgctgccgagtactctggtgtcaaggttgagttggcaaagaactttcagatgggtgtctccaacaagactcctgagtatctcaagatgaatcctattgggaaggtttgagcaaaaccacctctgaattttggtacatttgcacagaatctgatttggacacgtttcctttcaggtccctattctagagactcctgatggtcctgtttttgaaagcaatgcgattgcacgatatggtaagtgatacatagcaaggattccgttcttttaatccttttctctctattgcttgatttagttctaagttcctctcattttcctgaagttactcgctcgaagtctgacaacccactctatgggtcttcactgattgaatatgtgagtgatctttcataaatatttaggatcattcttgattattttccagctcctagaattttgtgtttctttcaggttgatctttcatagacatttaggatcattcttgattattttaccagctccttgaatttcttgtttctttcaggcccacattgagcagtggattgacttttcagccacagaggttgatgctaatactggaaaatggctcttcccacgtcttggatttgctccttatgttgctgtcgtaagtatggtcaagtgggtatcgttgtgttctccttgttagcaatttgtgatctaatcttgtttctgcctaacagagtgaggaagcagctattgctgctttgaagagatcattgggtgccctcaacacacaccttgcatcaaacacataccttgttggccattcagtgactcttgctgatattgtgatgacatgcaacctctacatgggctttgctcggatcatgaccaagaattttacttctgagttccctcatgttgagaggtacttctggaccatggttaaccagccaaactttaagaaagtcatgggtgatgtgaagcaggcagattctgtcccacaagttcaaaagaaggctgcagcaccaaaggagcagaagccaaaggaagccaagaaagaggccccaaaagaagctccaaagcctaaggcagctgagaaaccagaggaggaagaggaagcaccaaagccaaagccaaagaatcctcttgatttgctccctccaagcaaaatgatccttgatgagtggaagaggttatactcaaacacaaaaacaaacttccgtgaggttgctatcaagggtaagtttcttttttggaatctactagtcagtaaaaagtttccagatagacaaatttattgcattgctttgttgcaaaggatatgaatacaaattaggatacccgttagaatttgtttgtgtagcatcataaatagcaagcatgcatgtgactttttttagatgttatatgttgttagttacttttcaactgtgaactagctagctgtccaggatcagctgaaggcctggagttgttgcttttactgcaacttcagcagtcatcacatccagtaatccaacaagcaaccaatggctagaccaagagcatctcttttcctttctttctttatcgaatatttccaaaaccatgaaatcaatgaaacagaaaattaataaaaatattaagttggactataaataaaaaaacgccttgttttcagaactttaaaaaatgacactgttaactatgctattcttgtgtcaatttgtatctcaaacattctagtttagagaaaattaacatcttagctagagaattatagcatgcaaaaactgttagcctcttgttgttggatggagaaaattaacatcttagttagagaagatgctcaacatcttagcccattggtggcttgatggatggctatatgtgttgactgctaaagttgcagtcaaaacaactacctcagctgatcctgatctgtcaattagttctctcttctacaccattatttctcatctacaccaacttctgttgagtttgaactgctgtgaattgtactcaagttatcttctcatgtattgcaggtttctgggatatgtatgacccagaaggttactccctgtggttctgcgactacaaatacaatgatgagaacaccgtgtccttcgtgaccatgaacaaggttggtgggttcctgcagcgaatggacctgtgccgcaaatatgccttcgggaagatgcttgtgatcggctctgagccgccattcaaggtgaagggtctttggctcttccgtggccccgagatccccaagttcgtcatggatgaggtctacgacatggagctctatgagtggaccaaggttgacatctcagatgaggcccagaaggagcgcgtcagcgccatgattgaggaccttgagccatttgagggcgaggctttgctggatgcgaaatgcttcaagtgaggcgtcgttggagcaaggataccgtggaaaaatgagctatttaggttttggatttaccgttcgaaaatagttcatgattctgaaaaagaaaacactatcagcttgtggttatattagtctatattgagtgtgctctcgtttctgtgtgctgtttttaagagttttggcccttctatcttgtagttcttagttgttaaagacactatccatcgaatcatcatcggaaacacaccattccttgtgaatcggctgctgctcatatgataaacttggcaattctgatgttttcgaattgttatgcaagtaaaagaggtacagtgatgttcatgtttgtcagattttttgttagcgttgtccaaattcacttcatttttgttttcttttagcggtgtccaaattcatagggattcttttcttttaacgttgtccaaattcaaatttgtagggattctttacttttagcgttttcaaattcgttgttctagcttatgtcttatcctaactgcggttttttgggggatagagggaggagtcaattcagcttgcctaactgcggtttgtgttcatgtcttttacgtcaaaagttttgtacagatatatgcgctcaaacataacgtgtacataattatgggcaccagaacttacatcatcatcaccataccaacaatatctccgctagtaaccattcaatattataggaaagaggaccaaaggtaataagatattaagatgcatattcaagtcgatgcagagtaaaactctgtataaatgatatacaagatttgcatctggttaaataccgggccgcaactttttgcagacgccacaaaacttttgatttcgttttcccttttccattttttttaacctgaccttttctcctttttccaattatgaagcaagacaaaaaagaacgaaaaccaagatcctatctttgtggttaaattctgattctcagaatcaccgttccaaattccagaactgaacaaattatttacgatggcacagagcacttcgtgttgcaccacatttcttcacttggaactaacacactattgctttctccagcagcgcctttgcacggcttcagagagagttttgtcacattttttttttcacaacaggatgcatagaaccttcgtccatgcacatccatcctgcatgcagagactgcgaatacatctccacaaagcttcaacatgaaaaacttggcctctgtagtagtagagcttacatacttgtattttttgtttgacctgagactttttttttctcaggaagggatgtcagcagttttctggaacaactaaccgctgtaattgcttcagcggtgacaagagctgggagaacgatggtcgtttgcttggatcgctgcacgaaagaacattgggggtcattatcagtggagcaagtggcaggtaaaactaggtagaatgagaagagtagcatgttatccgggctggtttgttcttacttttcccagcacgaagatattatggtagccaccagtgggtcaatttctttgggaatttctagtcgcctgttctggaacccaactgctcctacaacttgcattggattcagtccactccatggtacacgcattgttgctagttcccataggattactccaaaactgtatacgtcacacctgatgccagcattcaattttcaatcagcaggagaacatgacaggaagtaaatggaaaggccaacatgtcatgagaaaactaagcaactcacttctcatttgatggctcattacgtagaacctctggtgccatccactccggctgtagcccaacataaaatatggtcaaggtgatggaataattagctaattacaggaaacacccaccaaatgaacaataaaaatgttattaatatagtacactatgccactacatgatcttggattaacaatgagttgtctaaaaagggtgaggctctacttccagaaaaaaataaaaagaccctgtgaaagtaactagggtaaagagagcatggcttgaactgatctatacaaaattagttgtgcagagcaaactacattgcacaatgttttgcataaaccattctgtttgaggacaccggcactatccaatgcctcaaatattgcatctaaacaccaggcagagcaatcaatgtgttattttgaagtctaaagttcaaatgatttgcatatcctagccgtgtaaagtgcaatagtgcgatattccagagtttctggagaacaaagatgaaaaaaaaaacaccttatcatacaatcaaaacgaggtaaaacatgaaaaagaaagtcaccagagcatcaaggatattactgttccagctgttgatttagaggacaggaaagtgtgatgtttcaaccttgacatgccaaaatctgacacctgcatgaaaaaatgcatgtatttacaatattattagtctatacgacatgaagctttttgtgatgcaattgctaattaaagaggaacatggatccctccattttaatgggcattgctgaattctgataaacaatttgtcaagtattctacacaagtttagctagatctactttacttgcatgtatagtagaaccagcaacttgttaccagtacatccctcactctaagctaacagaaccttgatatttaactacttctccataaatctccccaaagcacccaaacagcagctaatgcctagaggtctccactagcataccttttcatgggctgttttgatttgatgaatgagatggtgaatggaccacccaatccaaaatctaaacatacctacttgtgtggtttgaggaaataaatggtttggtccatgtgaccatgtccataaccatctcatccatcaaacacatatagtgaagtatgagaaacatggtcattcccaaaagcaggggaataaccatatgagaaatatgactctataagaaatatgcaacagcttaaaccaagcagaccataaattcatttggtacaacatcccatcttgatagcttatggtcttgcctaagaataacccagaagtataggattatttaaatggtcgctcaacaactgggtatcagacaagctgatcagtggcagactggcagtcaccacaaggtctgtttacatacagtattataatcgagagaatgtagtccagtgtatccaaatgttctgtttcatgtaaacactacattgaaaaaaaaagagcagaacatctttttgataccaaacaaatatcatatcaacttcagcaaatcttatattcttcctatgagaaaacagacaaggtttatccaagatgaaacagaacaacaagactagtaagctttttttttctgtattgaatgagaagagggttgtgatttctgagaaagtcaccttaacaacccaatttttatccactaaaagatttggggatttcaagtcacgatgcacaatagtaggatggctagcatgcaagtagttcatcccttttgcctgcaagacaataataaactgtcaacacggtataaaaataagcatcaacaacgaaaacaaacaaaacagcttcctgaagcttaccacatccaatgccatttttagccttcgtgtttcatcaatttgactgtttggcctatgcaataggcggtaaaggctccctctgaaaaaggaagtatgttatctttgttgtaatatctctttccgctcatataacatatgcacaaaagtagaaggagccaatggttatgttgactgaataaaccaaaaacaaagttggaggaaccttggaaggtattcagttaatatcgaaagatttggtggttgtgtcacatatcccaagaacagaactacatttggatgcctcagccttgacatgatcccaaccttgaagagaaggaatgcacactcagttgaggaaataaagtcgataatatttatacacaaactccaaaagagatgcaatgcattaaatcttaaaagtggactcacttcacatttgaattgatctagtgcaacacccgataaatcctggtcaagaaatttcttcactgcaacttcctgcaatagatgaggacaataaattaccagagcaagaaactcacaaaacaatggcaatttaggtgaaaatgaatcatatatgttttgtttcttccagcttggtaaatttgttacagtgggcctgatatttccctattttgttttattggccttcctaggcaacaaacctttgatatccaatagttacctgttaaaagtcactgctttgcaatacaatgaaccagtggtggctctatttatgagctagttcgtacagacacagtagttatccagtcctgtactgtcttactatttaagctatagaccttacgaccacttcgtactactagcaaaatataatataagaattgctcttcaaatatgtgacttacagtgccattccaatctgcatgatatacttccccatatgaacctgcaaaaataaatttagtttagaacacagagagtaatggtacaaaagaaaagtatccaatacattacagagtaatggtataaaataacacaaaatttaacttagttcagtatgtaaaaaaaattaaaaaggaaataacgatggggatcacattgcaaaatccagctaatttattccactctctagcctgaataagtgcagttttatttttatttttcagtgtctccataatacaactttggccaataacacagaaaacaccattggttgacagcgaattataacgcaatgaaagtggtgttggtttagttgtaaaagttcataatttagaacaccttcattctaaaactgaaccattagcaagttcctgaataaaaaaaaatccatgatacgcgcagcagatatcgtatattttggaaattagaggcattcagacaagcaccagtcgttaaaatagaacaatgtctgtgaaacaagatcgatttcacaatacaaagcttcaaagtggatgactaccaaaaatgttaaggaagaaccataaaaagtctgaattttcaatcaaataaatgaatgtatttattactaatgtatttagtgccatgtagagagcaagagacatttactctttctgcatatatattcatgtaacttggtgttcattgtaaacttgaaatgcagtatgttgtccccttagagaagctacctcttaattaactacttactgctatactagtaagtggtaatataagatcttggaattaatgcagatacctagaccaatgcgctctccaatatgaagatcttcccatggtatttcatagtcagcaacgtcatctataacagagctgattgttttcgtgctagaacagctcgacttgtccaagtttccattgctacttcctggcatcttcaccaaagagtcctcagaaaacctttggtcctcgttggcaatggcatgagctgtatgatcatgcaaatccaaatttctgccaattgcttctgtattccccacatcatgctgtgcatcttcatggaaacaattcactactgctagtgttttggtattgccatgttgcaatggagaatcttccgctacatgaccatttggcaaattttgacctgttttagcgattaccaaccatcctgcagttttgtcatcttcagaagcagtatgtttgcatatttcaggtttctcataggtgggtagcaatgcagtgccctccaggagcaagtcttgcaaattttgtgcaaactgtgggtccacttctgtgggcactaaatacatgggagcatcgttgactttcatcagatgcggaatttcccctccatcagatatggtactttgtttaagcgggttctctgtgtggaagatgtcttccagctgtgaacttgcaagtgctaaagcagatttttgttcagatgaacttccccccatgtcacttgtattcttacatccagcactaatctgctcaagggctatgcatagttctgcaacactctcctcgatggcatcattgctcagttgactattgttggagtcctgaaactgactgccagaaatatctgaagggattaatgtgcctggagctcccatcagatcaactatatattcaacactgcaataggatttgattgttatatatcaacacagaagatgtcctaatattaaatactgaaagattgtaaagatacaatgtagatacctgtcaaaatcaattttaaccaagttaatagccccttcatctgtccccgtataatatattcctttgacaagcttgcatggtagattaactcgatcagctagtacctgaaaccaatctgatcagttattttctttgtccaacagaaacctacttacgtagaaagctgtcaccaagatatgtagtcaatgaaacaaggttcaaaggtgtttctttttcatcaaccatttcaattatccattccatacagcaaattcaagatttaccgatgcccataaatgaactagattggcttccacagttggactaccacagctcataatggacaatataactggttgaaggtgagtactaaacatctaaacatttttcaatatcataactggaatcgggaatcatttgtgctttaaacaaccattccacaatgtaaattgtgcaacaagatggaaattgttaccatggggctattcccatattttcttacacttgacataatttaatgccctatgtgaatgactggattgaagtagaatacagtacttctgcagagatactaaccttaaatagcaaagatctgtggcgcgacaacccaatgcgaagcaaaccaagagggagaacaatactgttgcgctgaaggcatagcgcgcggctcttcactccccattccctgttcatttcatcagcatcatccaccggaccgcccatagcatcaaccacaaggtttgcaatcttctgcacgagctccggcgaagcgactccaccatgctccgccctatcctgcgcggcaattgccagagccctcccttcgagccgcttcagcgccggatcacgctcccgattgaccaaaactgccacgtacgcggcgtctccaccgacgggaaccgccctgagggtggtcagggaggggaatttggcctggaagtgcggatgcatcggcgcgccgcacacatcgtagaacccgtcggagagcctctcgtcgtagttgacgacgcagtggttccagtaccgcgcggagagggcctccatggggccccggtccccggcggcgccgccgaggctgatgcgctcggcggcccggatctggaccgagtcggcgtccacgagccccgcgtgatccgacgccgagatggccagcgcgagccgcacctggtactcctcctccagccgcgtcatcgtcgcgtccgcccccatccccctcggctccgccgccgccgccgccaccggagccgcaacaggagccatcaccggcgccgcctcggccgccgccgccgcggcgacgaccggaggaggcggcagcggcgggggctgcgccgacgaccgccgatgctgccgcgggcggtggtggtgctcccccgacggggcccccgccgccgccgctcctccgccgctcccgcccccacccgagaggtggagcttccgcagcagatgcttcatgcgtgacatggattaccaccaccaccacggaatcatacaactcctcctcctcctcctcctccctgatccgatccgcctacccaacccaacgaatcagcgtaccccgacgaactcacctcctccctcctccgagcaccaccgccgccgatctaccaatccattcccgcgctgctcgatcgcgcggcggccgctgtaaattcgttgcttcgcgtcggcttcgcctcggcgcgcggggggtagcagctgccaaggtgaagcgaggaagaagaagaagaaggcatcggcatcttcccctctctctccacttttttttttccttttttattatttttggattattattattattattattattattattattattattattattttgggttgctcgacgtgtagtagtggtagactggtttgggttgggttgcttgcgcggtctccggtttggggggatcggatgatgatggggagcgtgggtgacgtggcaggtttggatcgtgcggctgggattgatccgcaggcccgtggtccagactagaggcttccgagtggatggatggataactcagttttttggatggtttgacactaatccccacttctagattaacctagctctgtatggacgtgttcggcaaattgtgggtttataataaaaaaataaaaggtcattttagtttagtgtcaattctcatcgtaggagtaccgactattttttttaaagcaactcaatgtgtagttttggataatactttttttttttaggctgggaatccttcccctcagcgcttaaaatggatttacagtctcacagattaacataaattattaagtattgattaaaaaactttaaaatagactaatataaatttttaaaataactttcctacgttttttttaaaaagacaccgtttagcagttccgttcggaaaacatacgtagcaaaaatgagagaataaaagtattaaaaaaggaaagaaaaagcacattcttaggcagtcatttggattggaacaaacttttaccaaatctatagagctgagatacatctgttcaaataaaaatttggcaacattaaaagttgaaatattacacctaataaaagatgttttaatcttaggcatccttacatctcacaccttttattctaaccctccactagtttgtattttctaatcttatcctttatagccctaaatgcccctattttgattagaaaatcatcgctctatcggcaaaagtttcttctaataacttagcatacattcataatattcaaagttgaaagcgacaagttaaaaatgagctatgtatatcatcaacccgattctctttgttttccctctcacaacatatatagggattttttttttcttctcaatacatccttacattcttcccctctattaagaacttaaaaatgacaacgaaaagtaggatcctcgtcatgccggcattagagagaaaatgtgcgattatccctgaccttctactacgttcttctccatcatgacaatgtgcgagtatagtggaagcttaatgtcactttacattccgatacaagataatcactagggtaacaaaaattcagctggtttcaaaaatcaagattcttcgtgtaccatgtgtgttcaacaaatgaacaacttttacacgtctagaaaaaggaaaaccttatatataatgatctaacacctcattggtttatatatgcatttctctctcagctctagataacttaatttttactcaatgctataaaatcatagtagttttaccaagaattttacgctattccttcaaagatcaaatcttcataaactatcatttggaatttctaggtttgaccaagacagctagacctactaacgttggtcttcatctactccaaactctgttcacgtttcaactttttatttatttgtaacaaaatagaagccttcagtttttttttctcctttaattttcggtaaaagtggttgcctcctggcgatgatgagttgtattagccggcaagtatagccatgaaggttttgtttgactttcaacggcagatttggaaccatgcagacacccacattcattggccgagaagcgtataagcactggggccggctctcctgttgcttaatttgtcgtttaattaattacactattttagtgaccgagtcgccatcgtcttaacggactgagcgtctcaagctacagtaaaagaatttacttagctgcatccaggtcaagcagggcggaggtaggaagttatcaagagtaggaccatgtagatgtagtttcattcattgtgtttaaatttcgggtttgtttggtttggaaccaatttttactctaccaaaatcttggtagtgctaaaatattagcaaatattggcactaccaaattaggtagtgttgaatttgaactattgtggataaaatttggtagcaaatcaaatatgcacttgctactattgaagttaccaaaattttggtagggcaataagttggtatcaaagcaaacaatcccttcatctaaattttagtgtttttccattgattattttttgttacatatggggcccaagactaaggccctgtttgattcagcttaggattattataatctagattattatgagtaagctgaaataaacagatagcttattatgatagattattacaatctatacgccagattattataactagctgggtggcccgcgcaattgcgcggctagcacccaaacaaattcatataatttttagtatgattttacttaaaatttattaaatagctatctcattatcttaagactttgaaagaccaaaccttatcatcctcgtgtttgtacatatagtttttaaaagtcacaccagttgctacctcttatgtcatctccttttttatttgcttgctcgatctaccactattttaattcattcttcttgaaacctttaaaaattggattttataatttttagagtttattgtcacgttgggttttgcttttataatttccatatatcacgttaaacgttgctattatactgctctacggtccatccactgtttcttctctttattgtcaatgagatattaaaaatcgaacataattatcgtttgggttcatttttactttctagaagtcccgccaaaccgtcagcggctttgcgattgtactcctctacggctcacgcgctgcctcccttctttattgtcattgagattttaaaatcaaacatgattatcattggggtttttttttacttttttgaagttccaaaccttttaaaattggacttgtaattttattttttataatttttagaagtcccatcaaacggtaccactatgcccctctacagctcgtccgctgcctactctttattgcactgtgattctaaaaatcgaacataactatcgttggaatccattttttattttctagaagtcccatcaaccgtcggcggctctgcaactatactcttatacaccccgcctgctgcttctcctttttattgtcattgagattttaaaaatcaaatatgattatcaatgaggtttattttttttactttctagaagtcccggcaaccgccttacttgtttgcttcacggcctgcctgacgtccctccttttaatcgtcattaggattctatttagtgttttattaacagtttttatatgtcgtaacaaccgccaccactatactcctttataggcatgttacttaatttatctcgtcatgtgttttagatggtcatttcttttaatagtctttatttttatcacaaatttagttatttataaattgtatttctaattgaaatcttatttttctttttctaattttagaatttatttttttaaaaaaattagttaacatcgtattgtgttcttttagtgtttttattttttattttcaatttcagttgtttcaaaattgtattcctacttgatctctcttttaatttttataattttggatattattttattttttattcaaaattttaattaatctcgtattgggttttttatatggattcttctttcaatattgcttatttttaattccgaatttcagataatgttaaattgtattcctacttgaactcttcttttattttcttttgcttatttcggatttatttttatttttattctgaattttaattaatcttatttttaattctgaatttcagctatttttaaattgtattcctacttgactctcatttccttttttaattttggattttattttatttttatttcgaattttgattaatctcgtattagattcttgtattagattcttatatggaaacttctttcattatttcttatttttaattccgaatttcagctatttttaaattgtatttctacttggactctcctttccttttgtaattttggattttatttaatttttatttcgaattttgattaatctcgtattgggttcttatatggaaacttctttcaatattgcttatttttaattccgaatttcaactattttttaaattggattcctacttggactctcctttttctttttctttccttttctaattttggattttattttatttttatttcgaattttgattattttcgtattggattcttatatggaaacttatttcattattgcttatttttaattctgaatttcagctatttttaaattgtatttctacttggactctcctttccttttctaattttggattttattttatttttatttcaaaatttgattaatctcgtattgggttcttatatggaaacttctttcaatattgcttatttttaattctgaatttcagctatttttaaattggattcctacttggactctcatttttcttttttttctttttcttcgattaatgtgagaatttctagcccccacagcgaacgtgacgccacctttcaaagctgttttaataatataatagatctggtaatccactctaaatgtgctttttttaattattagatagctaacatctaacaaacagctaataatctagagaaacaaacaactaacagcttattctatatcaacttattataatccagcttatagtaatttggctcaataatctagattacaataatctcaaactaaaacaaacagggcctaagctgccccacaagtagctccgtccctgagcgcttgttgcatgctatgcaagcatgtatgtaaactcagtggcggagtcaggaaatttactatatgggatcaattattattattttagtatggtcatttatgtaaatttgaatggatttataggaaaaattaagattcaaagggcaatagtgaaaaagttgtggggttagccgacctcacaacttacacatagatctgccattctcagcgtaaacccggtttgtgccatcaagcaaaacaagtaccggttcgatggaaaatgtatgtcatcgctattattattggatcgccagtattgacgtaataggctattttaagtaaaacaaatttgtatttaaaaatgactggctagcatatatgagagcatagtataaccagtaagtttttttttcctggaaatatcttggggagtgaaagggagctagtggcatcgtggctcatgcatggctgtctacacatgtgagatggtagatggtactatctcctagttgagcattaatctataattatcgattgattaatcaaacgtgtgcttatgtgtgtgcacaactgcacatgctgatcgatgcaagttgacttatgcacacgggttcgtgtatgtgtatccatagctagccgacctattttgtcttgaagcaaagaattatacacaagtggctcgacctgttgacttatagtattaaaaaagggtacttttactttgcaacaaaataaagcacttgaattgtttatcgaacaaagagaagaaggagatacatgatggggtcaatggttagtgttatccaaatccgcttgcatcccaagggagagacggcagagcaaaatatctagagaagttttaacatctagacatatatatgtttagattcattaacatctatataaatgtgggcaatgttagaaagtcttataatgtaaaatggatgaagtatttcatatgtgtggttggtgtagacggagaaaaaagctattattttggaatttgtacaattatctaggcgatttcttaactcatccttttggcgtatgtgaaatgagaaattaaataccgaccattataagcttggaaaataaatttatttaattatttttatacaacttctatatagaatgcttttaaaagagtatcattttaacagtttaaaaacatgctaaaaaagagaaagttgaagtttgaaatcaaagaaaataagtaaataacatagcctaaacattctacaatttgatccttttaaaaatttatattacaaacagaccttccgcaaaatttgttctcccgttctctctctctttttttccacctttcggtgttatcatcgaatgggcctccggtgtaggcccatcatttcatcatgggcctcattcctgccagcccattcgtcagcccaagccgtcgagcggcggcgcgtctccgccgcgagcggcgccggcgagcggcatctcctccccacgccgcctcgccgtcggcgacgacgtccccagcgccaaggtcagccaccggcgccgccgccgcgcccccggtccctcctcccctttctctctggcttctctcatgtcccccctctatgccctccaccgcgggctgctccgccgcttcgcggcgcgcggccgtcgcgctcatccgcatcgagaagcggtgagctacaacccttgccgcattgcgatgttgtgacacgggcgagtcatggccgtcgccgccgccgccgccttgtcgtgccatacgccatcgcaacgcgccgccgcgcagcatagcagggcacgcccgtttggttccctctcaaatgggttcatctcgagcgatcggatgaatcggaatcgtcgaggcgctggaaggttcggttcggtcggttgatgatcgatttccctgtggtacgtacgattcaggaatcccatgcctgtattttttttctctttgcaaaaattccgtttcatcttccgctgcttaattctgcttgtgatgcgtacgaatcaggaatccacaggttctcttcagtgccaactagtattagttggtcccaatcttccagaatcaccatttctgcttggatgtttctaagcatgatggtattagtgaggtttgctcaatcaaactctatcgtgcacctgttcttctattttgacgaatcaccaacgattattttgtaataatcaggtgtcgtcctgctatgaagattccggtgccggaaatagaggagatgtatctgaaggagcacctgggtgttgatttagtgtatcattactttttttctttgacaaagaaagaatctatcatcactgatgatgatgtgaagaattgctagcacattgcttgactcgctcagcaatactttctggatcggtgagtccttatccttccctttttttttgctgcttctttatgttagcttccctgcatattgatctagattggttctgaaagatattacacgtggtaatacaggagttcttattcacattctggacagttaatccttatccaacatctctatcaaaaccatgtaactcttggtcactggctgggtaggacaaacacaaaaaaacaataagtaaatcttttcaggatgattagcctgacttttatgatgtgcaagagaagttgtacggacagtggccagcaatttcatagttaaatgaaaaatgaatagtttggtatgatataggtatgactttacgtatgccagcacatgaatggcattgatttcttctttctttattgttttatgttgatgaagagtcaaggtacaaaagtaaggaaatgtgaaaagagacatgcaaagaaatcacattaactgtgcttattctacagtatcctcatttaccaactaaatgcatgtgaactgtgaagtatcctacactatactcattttcttcctgctgacatctggtggaaagatttttctttttattttttttacattcatcaaccttgggctgcattcacttgcagttatttattgatgatgcatttttcctctcgatctctattccttaggaggttacatgaagtcaagtgcctgggctatagcagattcaattataaaaagaaaaacttgattaggtatctagtaatagaaattgagtaatgcccggcgaaaaagaaattgagtaatcgtgatagatatatatgcctgaaatgcatgcttgacggataaattgggttgtatatgaagtagtgtgtgtggtctacatgcactgatgcggatatttcagcatgggatcttgccaacaagattgttgaacagaaaattatttgcatttgaaagctttcactacatgacattatttttgtgtgaacccttttaattggctccgtgttcataactgtctcttttgtttcagcaatcctgtccatattcaaggtcaaaacaagaatgattctaccttaacatgggaaagctcgtgctacttgacaatgtcataatgaatcgcagtcaatctctgatattcgtatctgaagtctcctgcttgtgtccatttaccatgaaaccatcctggatgaagcccaatgaattgtggctgagaacagttgcctgattccagtcattttcatgtgccctcagttcactggcacttgatctgggaagaaaggtacacatttgttcctattgtattgctgttgacttgtcactatacacttagttctgcagttcctttattgtgtaatatcctggcattatttgtgatgtatgactctgcaatgtttggtaggcaacctgtttgagaggaactgcccatcttgaggtaaaccctccaggccttgtcgacaatggattcgagtcagcagtgctttatatatgcaggtaatttgttaagaaaactcatatcaatcaatatgtcactttcatctgtagactacccagacttagatatgtctatgcagaagtttctcatggcattccatacttcctaagttcctagtcccgattccaacttcagtttgcattgccaattgcccaattagcgtatggaaatcttttcatgcttttttgtttggatgtcaagtctgattgattagtctaaccaaatactgaaatactattctttattgcatcagctcgcatgatggttatttatctctgaattttccatctttcaagtttcaaacatggtcagtagtccaacatagcggcatacatatatattttttctttcgcaaataagcagacatgctgcttagcagggagcagatctggtgcagttgtgcgtagtccttaacgtcaaatctttttcacttccattgaacggaagtgcctgtcacatgtccttagacaattctttgctcctttagtacctttccaaccagattaatcctcaaggtgcatgacttccaagtactttcaaagtacgataggggatcgatggatacttcggtggttcttagtccctcgttctgttctctgactggaatattatgcatccatggtccatatggatctatatctggtccctcatctagattctttctgggtagttttccaacaaaattcaatgatcataacatcaatgaaaatccacaggaactcatcaggcatgtcgggtttgacagcaatgcgaaaggatcctgtctatgattggtgtctggtgaccatcagcagcggctggtccgggaaaacggatgccacagaaggatatagcggctcaaattgcgacctgtccaccccaccaacacaaaggtatatttggtttttgacctaagttcgctacacccaatcttagccatgccatttcatgccacaatttatcaggaaagcgtttgattaatttgattaatttctgcgacaatagcaacccatctttgttagtgttttggcccacttgttaagttgttattctaaccagactgtcaacaacaaaatgtcacggtttgtatgccgcggcacaccttaactaattttgttgtagtaaagttacttatcaaataaatccttaaccatataatataactttttaaagatgaggcgttccacaatttttatggctaacaaattattttccatgaggaaactgggtctacgataagagaggtactaaatataatgttttgtggtgtgtgaaattttagcagtaaactagttggttagtcttgccaaagatgtatcgaagtgtggccaccaatcgaaaacccttagtagccacaagccggcaatcctgaacttccactgttggaggatttccaattagaaaaagggcggtcaaatgttacagttgaccaacaagtgaaacattaagttatatatgaaaaaaaaaatcagcaactgaagcatttaaaaattttgtgaaacacggtgaagatacacattgaaacatgttgctatcacatataaaacaacgagtgttaacggattgaaaatatatgttttttttcatcaaaatataatcatgtgatatcttattataaagatttaattacaacgaatacaatggtgcgatcggattgtagattggataactaggtaggagaaaaatcattttgaagatcgctaaaatgcatacatacatgcatagagtggagagagagtagtgacaagtagtcccgtgaattttgtgaaacacaccacatattgaaacatatcactatcacgtatgagacattgagttttaatggtttaaaagacatggttatattttattataatataatcgtatgatatcatgttgtaaagatttatttacaacgaatacaatggtgtgatcggatcgtaaatcggataagtaatttaggagaaaaaaatatttaaagagagaagaaaggaagaataagaagaaattaactagttaggagtatgcatgtgagagtgtagggtgctcgagtctgggcaatctctcatgcatatgcaaacaattctctatgtatagaagggggaataagatgaaatttgttgctagggtcttagtggacaacgcaattggtgttcggatctcattgtatcccaccattagagtttgaccagtccccaaaattattattcgaacaaacatatagtaaatccgtagaaaaaattgccagtttaaaatatatgcatctgtaaggccgtttacacacaaagttccatctcttcctctctagaacgcagttcaaccatgttgtaacaccgggctagctttgtcacaagtcacaaccctgttgaactacatcaagaattcaaaaagaatgcaaaattgcagcaatatctgctcccataccatccgcccatccccaattagatcctaatcgaatggttatatttctcctccattttacctcaaaagcttaaaaagaaaatctaagctgtgtttggatccgaatcccagaaatttcccagagacgaaaacccctcatcctccaaacacccgcttcaaaattccaaaaaaaaaaaagagaaaatgatcttgatttgaaactgatctacttgttcaagccccaaatgcgtacgtacgtgtgcacgcgtcaccaaccccaacttctcgaagaaggaagcgcacgcatcgatcgatcacgagctggccggaccaggtcgaggtgagggtcaaagccgacgggctacggcggcggcggcggcgccaccaaactctcgacggccttcgcgatagcttccttgagcgacgcttcgtcgaattcgcccgcctgcaaaggttgtcgcaagaatataaagatatcaatcattttttttagataatgataaagatatcaatcatatgctatatacacatggttttggtaattaaattctccagcatataaaaaatacacatccacgtgctgcactgtctactacagtactccctccatctattttctataaacttaatcaaacttaacgaggtttgactgaaaaaaatcaacgacttataatataaaatagaggaagagtatatacaacctcattttaataaatgacgccgttgatttttaatcatataattgaccattcatcttattcaaaaaatttatgtaattataatttattttttttataagttgttttatcgctcaaagtattttaaacatgatttatatcttatacatttttataatttttttaacaaaactaatggtcaaacatgcgtttaaaagttagtaacgtcatttattaaaagacggagagagtatatgtttaccgtggagaaacatttttttttgtgtgtgtattgtaacaagtatttcttgattattgatacggtgtgaggacctaattggagccttggaccactactactttctactggaatatagcgctaagttctaatttgattttctttttttgggtaagaatctagatatatgtagaggagtaaagatatatccatactcaagattcaaaagttttgccgcacatatatctgacattaattaggaatggacaaaaagaaaaatcaaatatcatggctcagcttggatcggctcattgcaaacttgaccatggatcgacttgaattcatatatcgtaatgagttgagctaagcttgaggttgagggaatcatgcgagctacccgttcatagcatacaaggtcaccatatctttttatacttcggcttattaattagtggttaaccctttaaattactttcaatccatcggataattatccactggtttactagttagtgtttattattttaaaatagatgataaattagtatatgctgaaattatagaggtgatataaatgagcctaataacgagcaacgccctatgaaccgagttggctcgttatgaccgtatatgtcacaacgggctcataattaagtagttttaggcaattttggtctaaggttatggttccatcgtttgcttgttggcttatcagtcacaaccaaaatttaaattttaaaattaaaaattattatactttatttttgtatattagctttcaaatcactaatgatatactgacggggttaatttcatggactcataagaggggcaactagccaaaccactggcctggtcaaagtcaaggcgagttgattgaaacggcccggtaattttatcttgttcctcctcctatggctagatgaagctcttcaagcaattctgcagatttggtgcagttaccagatgaagctcttgataaactgtttgctgaaaggaacatgacatcgattgggatttggatggaaatgaattgaaaacccgggcctctagtgttttggacttgtatgctgtctgtccgtgacgtcatgcatcccacacagcaacagccaacaggggcagtcaagttttccagttgagttttctccggtgggccccacccccgtcgctgtagggtaaactaggctgatctggttgactttgacctaggtttgaacaaccaaatctctctttcttcgtcactcacctctctctcatgagcccatgacaatgaacacaaaatggagcagctcaagatagtagaccagctaacagtttggatatatatatatatatatatatatatatatatatatatatatatatatatatatatatatatatattgaaataattgttataaacatttgtgatcattgattatgactagttaggtgagatatgcacaacaattaacagacgtctggaacggaatccaaatataacatatatacgaaacaatacaatctctatttgtaattttataaaatcaatcttgtgtttcaaataaaggctacatataaatattactagcattaagcttgcactacgaatgatatatataaaaacggatactccctccattttaaaatacaagacatagttcaatcttgataactttgacaaataataaatcataatatttatgtttagtgtcatgtatataagttagatttgtatttgaaaatattttcacatttcatataatgtgtagcattaggcaccgtataaaaaaactatatgtgtcttataatcttataatttggtcagaggaagaatgattttttgcacgaaacatacgtttcaacagggtaagcatccgtaccgttgctcgtagtgttaggctggcctgagcgacgccattgccgccgccgccgcccggctgcctcgcgtcgacggccaccaccgtgaagccgcccatcgccttgagcagtgcgagcacccggagcacgagctccgacacgtcggcgccgccgcgctccggcgcccgcaccgccaccctcacggtcacctctggcgccgacgacgacgacgatgccgatgcgccgccgtcgtgatcaccgccgccgatcacatggacctgcaccctctccggcgagccgccggcggcggcggcgacggctagccattggtgattatggtgatggtgaacctcgttgactgttcggatcattgatgatctcgatgatgatgatccattggcgcgttggtggatttgggtttggagtgctcggttcttggcttcgagctccgagatttgagctatcagcaagttcatgtactctagtgtcttggcaagaactgtggccttgtctttctgaaatgccagtagttgatttgattaagatcgagaagctattaataattagtagaacagattaattagcagagttaatgtgcaatacgcaaaataaaattgtagtaattaaaactggaaaaatggcaatgtgtagtatttcattggttagataatggaaaaacgttaatgatttccgcctgatctgtacttcaatctgatgagaacaatatgcaagtaatataagattctaacaatttgaactagcaaataatgtttagaagcatttcaggttgaatttgaacaagattttctggaagctaattaaaatgggtttaatttgcattgcaacaaggacacaagccacaaggtcattaacatgatggtgcaattaactcatgttaattattaggagtatagtttacctttgatcctggaggaagcaaacctctcaagtgctcgaagctctcgttgagccgctcgcgccgccgccgctccgatatcatatggtggagctggctgctcgtcggcggcggcggcgcggccgtggcgtcctcgtcgtcgccgccgccgctccgctgtgccgcggcagcgctggcagcggcggcggcggcggcggcgcgctcctggctgcacctgaccatgtgcatcctcctcaggatggagaagcccatcttgatcatccgctgccccggcgcgcccggcggccgccgcgacgccgccgcgcgcggcgccagcgcggcgttgtacgcccggaacgccgtcgtcgtcggcgtcccacgccgcggagaccggatgatctgcgcgcggtgcttgacggacgaccacggggcgtgcagcgccgccgccgaggacgacgtcgagggggaggagatgacgtcgagcatcgcctgtgccatggcggcgtcgtcggcctcggcgctcgggaagtggaggacgccgctgccgccgacgccgccgtggcgggagaacggcgacacgtggacgtggtgcggcgccggagggcgcggatggagccgggacgacgacgacggcgtcgtcgtcgtcgtcgtcgtcgtcgccacctgcgccgcgagctctcggggcgacggcgtggcggatgacgaggccatcatgggcgtcatcgtgcggagcagcgacgtggaggcggcgccgtcggccgggctgccgacgagcgaggacgacgacgacgacggccgcgtcggcggcagctggaggagctcctcgagcagcgactgctggaagaagtcctcggagaagacctgctccacgctcgcctgcaagctgccgccgccgccgccgccaccgtagttctccgccggcgccgtcgagaagccgacctcgatctcgccgctctcgcatcccatgaacgccgccatctgcacgccaccaagaatggcccatgtcagcttcatccttctcgatttctaacacgatcatcttacgaaacaatattatgaaatggattacgaaccttaatgccagcttcctgaaagaattttaccacaaaagatcatacgaattcgttagtaaatccataaatttctcaggtgtttgatcaactaatggaacccaaattgatcaagaagcaagtggatcaagcagatcgaacaagtgcatgcaccggtgagttccgagttctgacctggtagaagctttgctgcaccggcagcgaggcggaggcgacgagctcgagctccgagagctccatgaacacgccaccgccgccgccgacgtacgcccaccccggcacgcacccggtcacggcgccgcagacggatccccggtacgcgtcgaacagcgcgcgcacgcagccgccgccgtcctcaccaccggagagccatccgtcgacgcagtagagcagacgcgcagcaccggcggcgccgccggaagaaggacgctggtggtgcaggccggcggcggcgacgagggggaggggagcccaggcgcagacgtaggcgcagccggggaggcgcgcggcggcgcggtggaggatgcgctgccgggactcttggccgagcacgaagatggtgtccatgcaacggccacgatcaccacatggtctccatgactacctaacttaattagccaacccaaactactacttcttcttggcccgcctcggcgagatggcgcggttgccgtcgacgatagaatgggagatttaggggtatatatatgcgcgcgggaaggaggggagcaaaggtgaagactgaggacgaggacgacgacgagggctgcggcggagatggggatgcatgggaaagacatgcattgatgcatgtgtggatgggagtggatcggaggcgggaaaagtaggaaggtagcttaggaggaataggagaagcaagaatggtgaaatgatggtgggggtggattggtgaagggtttggtttggggagaatggatggagacattcatggatggatggatggaaaggaaggaggttgaaaagtactaggggtagtgttatctattggaatagaaagtcgttcaaaggtcttccctgtgtgatggtgggtgatatgatgctgggtgccttgatagcttaagatgatcttgaaaaagggtcaaacaaggtggcacaaacgtagctaccatggggggctgcccgctgccctagttctgtgcatgtgttgtttaaaaggccaaaaaaaattgataagatatatcaatatgcggatatgctattttacaaacatgtaaattcaaattcgacttatacaatttaaaaaataaaaaaattgataattgtataagttgaatttgaacctgtattttttagaatgacatcacatattgatctattttactatttttttcaaatctttatagagaaaattaatttaagtgacatgtaaaaataagaggatatctcctcaagggattaatagagttccctaggctggctgtacttggaggagccaagccactagccatttttcggttagctacttaggcctagttcgaatgtacaatttgatttgtcttttcggcaacatataaaacgatataagttattagcacatgattagttgaaataaattattataaacttttaaaatatgtttgtttgatttcttaaggaaacttctacataaaaagtttttttttttagaaaaacacacatttaacaatttaaaaagtgcatgggctagaaaaaaaagttacaaacaatggagcttaaggctcaaatagtggctgagcgtgaaattactcaacattaggactgtactagggctcaaataccaaaatttatatagtgattaaacttgattttggaggcatgtcggctgtcacataaagcttgattaatctctatggtacgtatgaacctcttgttattttaatttcatcctgttttattttctgcaccagcagtatgcaatttcatattgatatagcaaaaagaattaaaaaaaatatggaaggctacaatcaagaaaaaagaaacataacaatccaagaaatggactagcaccaagccagatgccgttacctctacggagtggtcacaaacgcaccacccatcaccaactccaagcaaaaggtcgcccaaattagactctcatatatacccacggagaaaggttgccgagtgagagggtgagagaaaaagatacactcgtgcatcacataaacctaatggtgaaaccatgagagtcgctaaagactaagatgcttgaaggcagcacatgtgagaaacaaggcatcttaattactccctccgtcccaaaaaaaaggcaaaccctaggtttccgtatccaactttgacggtccatcttataattcgtatttttattgttgttagatgataaaacatgattaatattttatgcgtgacttgtccttttatttttttcataattttttcaaataagacggacggtcaaacattgggcacggaaaccagggtttatctttttttgggacggagagagtagacaatacttctagagaggtcacgatgtcaagagaatcgccaccacctggccaagacacctcggacttgattttcacatgaagagccccactagggagggagagagagatgcctcacaatgtccagccccaaggggggaccgtgacgctcaagctattgttgctagtcctaaaaaaatgtcgagccaggctttcgcctacaactccctcccctttgagggagtgcccaatagaagatgacttgccgccaccgccattgatattgttcggttgaatcgaacacgccatctagaggcaccctcctttctgttgctgcaaccactagcctcacctgctgcaaagaaacattcgctagccaggaagcttgcccacagcctccggtagcctttgccaacatccaggccatgactaccgctagcctctgccgctcacaccggccacccgctagagtcgcgcacgctagctcccaccaaggcttcaatggacgtcgacgcgtacccaattgaccttggctagatctgccacagaggcatcggatctagctatagcagcgctagatctagccaccgatggcagtgtcctcttaaagccttcaaggccacagacggtgcccaactcaatgtggtgaagccccactgctgccttcattgcagtcgtgcagacttctggtggctcactgatcagacgacagtaaggtgtagagaaggaagaggaatgacaggggcagtgacgatgagttccacatgtgtcaccctagagatgatgcggggatgtcatgttttattaggtctagtttggaacacaacaattagttttccttagatttatagaaatagaattgactaatgtggaaatcctacatgcattgtgttagtatgatgattattgttatcatgcatattttgttttatgcttgagttattcaagattagtaagtgcgtgggggtactttagttgttttttatatatcaaatatttaattctcacataatggaagagtttcatgaaaataaaaaaacaagagggctcgagatagagcaagttttaagagaactagctgggtggcccacgcaattgcgcggctagcacaaaaaaatcatatattttttaagtatgattttacttaaaatttattaaatagctatctcattgttaagactttgaaagaccaaaccttatcatcctcgtgtttctaattatatactttataaaaatcacaccagttgctaccccttatgtcaactccttctttatttgcttgcttgatctatcactatttctattcattcttcttggaacctttaaaaattggattttatagtttttagagtttattgtcacgttgggtttcgtttttataatttctagatgtcccgtcaaacgttgccattatactcctctacggcccgtccactatctcttctctttattgtcattgagattttaaaaatcgaacataattatagtttgggttcatttttactttctagaagttcccccaaatcgtcaacggttttgccattgtactcctctacggctcgcccgctgtctcccttctttattgtcattgagattttaaaatcgaacatgattaccattgtttttttttactttttagaagttcagaacattcaaaaattggacttgtattttcattttttataatttttagaagtcacatcaaacgatgccactatgcctctctgcagcccgtctgccgcctactctttatgtcattgtgattctaaaaatcgaacataactatcgttgcaattcattttttatattctagaagtcccgtcaaccgtcggaggctctgcaactatactcttacacaccccgcccgctgcttctcctttttattgtcattgagattttaaaaatcgaaaatgattatcaatgtggttttttttttactttctaaaagtcccggcaaccgccttacttgtttgcttcacggcctgcctgacgtccctccttttaatcgtcattaggattctatttggtgttttattaacaatttttatatgccgtatcaaccgccaccaactatactcctttataggcctgttacttaatttatctcgtcatgtgttttagatagtcttttctttcaatagtccttagttttatcacaaaatttagttatttatgaattttattccttattgaaatctttttttttctaatttcagaatttattttttaaaaaaaatagttaataccgtattgtgttcttttaatgtttttatttttaatttttaatttcagttgtttcaaaattgtattcctacttgaactctgttttagtttttctaattttgtatattattatatttttattcaaaattttaattaatcttgtattgggttcttatatgaattcttctttcaatattgcttatttttaattccgaatttcagctaattttaaattgtattcctacttgaactcttctttattttcttttgctaattttggatttttttatttttattttgaattttaattaatctcgtattgggttcttatatggactcttcttttaatattccttattttttaattccgaatttcagctatttttaaattgtattcctacttggactgtcgtttccttttctaattttggattttattttatttttatttcaaattttgattaatctcatactgggttcttatatggaaacttctttcaatattgctaatttttaattctgaatttcagcaatttttaaattgtatttctacttggactctcctttccttttctaattttggattttattttattttatttcgaattttgattaatctcgtattgggttcttatatggaaacttctttcaatattgcttatttttaatttcgaattttagctatttttagattgtatttctactcggactctccttttcttttttttctttttctccgattaatgtgggaatttctagcccccacagcgaatgtggtgcctcctttcaaagctgttttaataatatattagatagattgagaggtaattaaacacttgctctattcttaacggttgcaataatttgacagctttcatcatcatttcctaaacggttgaacttaccgcgaaaactcgcatcccggccatggcattggacttatttttgcataaccgaggggagctacatatgtacagtatatatcctatggtcaagctggtagagtttgatcctttttatgaaagacatgatagtgccatttaccaaacgcctccttaattggatctcaaaaccacaaaaagtatatgcagtcaaaatcattgatagacacaacttagagaccaaaggtttggttatccttatattatatttctattagtccttcaggttaaaaaccctgagagattcagattcttcgtttcttttctcccctccttttcgtcagttgatttggcaacaagcagtttggttaatttaattaagatgcataaatatgaatacatggggtccatggagatcattaacaccgtgcacttggtccactgcttttgggcctttttctctgctaaattgggatttggtcttcgcccgtataccattcttcagtaatcaggccaggtcaaggatgcaactgctggagtgctggtgcacagcacagggtgcaatggaccatggcatctttcgtactatcctcaatagaacaaatgctaattaatcggttcatcaattaattaatttcattgttacattgcacaatactacatttgcagtagtactactactagtcgtagtcaaagaaatgcagtggctaaatggctaatgtgtgctttgttttagcttattaattaatcagctgatgatcatacgaacacagcgcgtgacactggttcacattgaagctctagttgttgattgggatttcattattagtttaagttgctgctggaatattgtatgagccatttgggtgcgtaccaacctcgatcacaatctggttgcaattgactattagatgcatgctgtcaattagttgtgcagaattgtagtggtgattggtgaactagtgtgatgtcataacatttgatatttagagcaatatgcatagtgtgaacttaacctagattgctagagaagatggtaagatgaacaatatcaaaggcaaaaacagaggaatattatcatagtaaattacaattcattcctatacacgacagcttctttggaacatatggattttacaggattttcacatgaacaattagttaaatttccgtataactcctataaaaatatcatccattcgaaaggaggattgaatagggaaaaaaaatcgtattccagacctggaaagtaaagaagcctttcattcacaagtgttcaccacctgtgagtcattttaaatgaaaccttagttaacattaacatgggtgctagtttcagagccaagtcaaatttcagtcttctttcgcacacttccgccataaatctaactaaactttagatagtactctgaagttgatcaattaaatttgttgtctctgaaaaagaccacaaaaaagtattagtattctccaatctttagatcctgccaaactgcatagatatgctatccaagtccacccggaccaaatgaaaactacatatatgcatgcacaaccgaatcttgatgccattgacagtatctgatttgatgcagaaaagtagtcacttacttgatgacatgtcttgtataattttccctttaattaatgcagataaaatgttttgcttagatcatttgattagttgactgggatccacatccactcgatctagtacctcataagttgagtttaccacttttaattgattccaaatctagctaacacctatttgtttatcgatttaattacttagtgccacatgtctgcacttttagaggtttgaattaggttaaccatgcttgtacccgtaaagttgtaaacctccctttttgacaagttcggtgagattcttgtataattaaaagctccaaaaggttagtattaccagcaaacaattaattgctaggacacttggcaagcctatatataagtattatatatacaatgtgccgcatgtcttatatggtggttatactggaacttgatcatttgatctacaaaggatatagcggtttttttcgtaataccaaattcatcataaaaaaatattcgtaaaaaatatacggcagttttgtatgtgaaacggacgtgactacgtgtccttgagacaatgagctgcatacgtcaaatagaaagacacaaaagaaaataataagttgcaaataaattaaaggaacttataaaattctaatggttgacaaaagatttgtcttggaaatggctatcatacgaaacaatgaaattgtttggaaaattacgaagttcattgaaaaaaaaaagagacatctttgaaacgttttctcaattcatgcctttgttggtgcagtctttggctggtgagttggaacttggaagtagcggcagcaacactgcattttctttttcattttttgacgaaactactgcaggagataaattacacgtagttaatatattaaaagcaaagaagcttatgtacaagacaggaaaaaaaatacaaaagggtaagccatgcttctacgtgatttctcatttctctagcttttgtctttattttcaaaagatcttccttcaaaagacgtctccaagtagctatcaaacctactttagctactttagcatcaaaaggttactccacttcgctgattactccattacgctgtttctaaatatgccaagcagcatagagagtcatctcgataaaatttaataaactataaaacttttagcagtgaacatcgtattggaaaaaacaaactcaactaggtacccaaatgcttcacaacactttaagttttcttacaattttaatccgtgcgtcctattaaagacgatctgttggcttcaatctaaatatatatgtgctatgtctatattcaaatgcttcaaaatctctctctctctctctatatatatatatgtatatatatgtgtgtgtgtatatatatatatgtgtatatatatatgtgtgtgtgtgtgtgtgtgtgtgtgtgtgtgtgtatatatatatatatatatatatatatatatatatacacacacacacgtgtgtgtacgttctaggtagttttttatgcgatggacggagtacctcatttgtgagactttttcaaagagaaacaaaataagcgaaacctccgtttagtttgtaataatttatctgaattgaaagaaaatgtttgtccgtaatcggtggtttcgcatgcggtcgttttcgagggtcaaattccggtcaactcaaataatcactgcaggtcgtcgatcgagtctgtagctacagacttaatcaatgatggattagtaataattgttattatctgtcacgattttgtatgtgaatgtgacagtatgtgtgcccacccggccgtacaaatgtgattagtctttggtttcgtagtaatccatgttagcctgagctatactataagctaggcgtgcgtttatacgcgcagacgacctgtttgtgtcccgtcgatttcatttgccacgtcagcttgctgcagacccacagttcgttggctggaaaatgagagacgggaaaaggaagaaggggatgaatggagaagccatgggtattttagtcctaaaatataagaaaatacattgaaatgatacgtagtggtacatcgaaaattataatgatatggttacaaataggtgaatagtaatggcatattttaaaaccataaaaattataatggcatggatcaagtttcctctggaaaggatggattaagttttggattttcgtggcacgcttttcaaaccgctaaacggtgcgtttcgtgcgaaaactttctatatgaaagttgttctaaaatatcatattaatccattttcaagtttgtaataattaaaaattaattaatcacacgttattaccacctcgttttacgtaaaatacttaatcttcatctttatctttatcttcaggagattcaaacacctaaccaatgaaatatatactagtattatgaactcggacatatatgtctcattcattatggttattataatttgggatgaaggtagcatgacattttctttatagattccaataagaaaatttcatatgaaatactttagaataaaggattaatataatatacctttgaaattgggccaatccatgagacttttggaggaaaataattatagggttgtaccgcatgtttctttcttcctatgtctcatcatggttcctgtgttttcttatgtgttattcaaatgattttaaaactttgcctataattttatatttttctttcatgtaatgtgcatggcatcctatccatgtgttttcacaattttgcattcagaaggggctttagatttttttttatccacattgatactaagctcctcttaagtatcttacattttcttctaaattttatctctcaatatcttctattacctcaatcccaggatataatgatttgtagggttgaacataagtattaagtaagtagatggaattaaatgtgaaaagattttgattagtagagaggagaaagtaggtgaggaagttgttatattttagaacaaaatttaaatactatgttattatattttgagatagaggaagtaactcacagtgaaaatataaaaatacatgagaaagaagatattataaagagtaaatttaagaaaactgcaactttagtgacaaaactatcagtttgctacaacattagcaacatgtttcagtttgcagcgacatgtttcagtttgctgcaacaataacttttacaataacaataacaatagcatgtgaaactatcacaaaactataacttttgcgttatatgctgctacagtacatataggtgacaactgtagcagcatataacgtaaaagttgcagttttggaataatttttcacgctattgttacagcaaactaaaacatgtcgctaatgttgtagcaaactgatagttttgttactaaagttgtagttttctgaaatttactctattataaatgtatgtgaaataatatatcataagtcaaaatttactatgtgacgctctaactatgcggcattggacatatgtgacactaaaacaattatgtcactaccactggacacttctatttatcgaagcacactatattcactatataaatatatttggttcaaataaatactcatttacaaataacgctttgtgtcccttagccaaatcattgcaccaatcgattgccgattcgagatctctaatcccttgccactcccctccccaaatcaagcagccacatcttcgccctgatccgtcaacaatgttttgtcttctggcgataggacctagtttgtggacgatggttgtgtggtagtggtgattgtgctggttcgctttaattaacaaaaacaagttcgtttggccaatcctgatggagcttggcatcgctgaattacttgtgaatccatcgtcaaatctcctataattgattagaattcctcttgtacgtgatttgaaagatatattcaggtgagaaacctcttccctccggtgacttgttttttaaaaactagtacgtacacatttacggtatagagccttgaagaaaccaaaaagaaaaatagaaagaaagaaagaaaagaaaagaaacgaaaaaagggagaaaagaagaagctaaagcgaaagagagacattgattgaaggctctccgcagctactagagttcactgagatatatagcaacagtggtgaagggatttgagattaggggatgagagggtggggataagcaataagaccgagagaacttttccggtacaacatactgatggtatacactgccagtataaatgatttaacagtgcagattgatttgatcttctaattaattggtttgcagtacaaaaatttagaagggtagatttgtctttcgatgcggtggttcaggtccggcctctccctccttggtggcatcgttagccgaccaagggctctcagcatgcaccaattgcgttgtcgggcacgcacacaggtgcatgaggttctgtggccacttctagcaccttcaaggtgctgctatggcagtctctggaaactaaaatttgcttgcatggacaacagcctatagcaccgacatatgagaataatctaggtgttgtggtgtatgttagtattccaaactaaaatgagatattgtgttttttacgtgcgccgcaaatgtggaatatgaaactgcatttgtcaggtttgccgccgtctctcgtgagtgtagccaagcagcgacgagtcacaccgtcgccatgcgcacgccgtcgaattgcgtcgctgccagagctcgtcttcccctgtctctcgcgagcctgtcttacacattacgtcacaaatataatataaggattctataaataaggattaattgagcctgaataatgaattacaattttttatcaaattcctaatttacccttgtaaatactagcagcatatactgccagtacaatgtactgtaaaagttctcaagactgattgaccaatatcaatagcaaagaggtcaaatagtcactatcaataacaatcaattcgtaaactagttctttaaaaaaaacttcaattctagctctttaataatatcattgaaagtttggaacaagtctttattgctaaatcctttcaatctaaactactgaataatctcataaataagtatattctattttaatttgaaaaaaagatgagaaatcacaaactaaatttgaaatttgtagatcatgttctttctaattttttttcagaactgatcttgtaattagtacagccatataacaacaggtgttgggggggggggggggggggttggccccctccggcaccgcacagctgtgccactgtatagcaaagcttggacaaccacgtttcccaaggctagaaagacttaattagtcacatatgaactagctgtatttgaatttggacaactttaaatgagatagataggatgcttcaactaagtaaatagcttcaataattttaaataaacatttttaagacaatagcagtacaaagtctttatgtacatagaatgtttgcatgaataaagtttgcttatttggtcatacaatattctaaccaaacatataaatactagctagggtacgtttgtaaaggctttcttcaaatgttattgtgccaatccactccagtggaagacacactttttggaggtgtgtattccatatttgatttttataaaattaatgtttgtttcatcaacgaaaaatatgaaaaattcttggttctaaaagggataaactatagaaagataattatattgttggtttaacatgattttcaagcataacagatccatttttcaaaacatattgtccgcttatggaagaaaaaaaacatatctacaagtggcaaacagtgtgctcataaaacaataatagatatagagcaaagcttgaaaaccaaagtttccccatgtaagaaagacatgatctcatcaactttgtgcacttgcgtatggacaacattcatactttaatgagatagcttcaactaaataaatagtaaagtagatgtttttctgacgatccacaccatctccataaatgtcagccaatgctagtttggttacaaacaacactaatagcgataacttgtatagaacctaaaaggcattctaatagattagagccatctgtttaaactagtggcaggcgcacgattttggtggtgggtatttcatatttgcacagtgagatttttataaaaaaaaatgtttgtttcatcaatgaaaatatacaggttcttaaatttggaaaatataccatgtttttcctggttagaaagacgtctcatcaactttgtgcacttacatatggacaacatgcatactttaatgagatagcttcatcaaaataaactatacaaagtgttttggatattagaattcctataattgattagaattcgttttataattgattagaattcctttgtaatttttctccaaagaagcccatctataatggtcaaaagttgatcaattgtcatattatacatcaaagttgtgccctttttctaaaaatggtatctaagtcatgaactgacaaaataaatcgtaatcaataacttgaaaaacccataacatgggaaattaagaaacgatcattgcgtgggaaaaataaagttggactattgacattacaaacatcaagacatctcatcaataattaagttctaattacgcataacgggaaaataaagttggacccatgtttgaacttgaaatatcaaacagcttacaaaacccaagaagtactcaacactcaagagtcaatctcagcttttcttttcttccttttctttcaaggatacatcattcgaaggtacgtataacactacaccatgccccaagtttccttactacatatctgtcagcaaagaccctatctagtggcaaactgtgtcagtaatttttttcccgacagagatggtctgtcaggacaagtgctgccggcaaaggtctttcccgacagataaatctgtgctgacagataggttggcaatgtttttttgctcttgccgacggataatttttcctgacagacggaccttttccgacatatggatctttgctgacaaatagtgtgacatgactcatacttttcccggcagataatatgacaccaagaatctatcaggccaaaaaaaaataaataaatggagctcatcacaacaagcaacacatgacaaattaagtgtacttttcactaattttactaatcgattactgaatccaacatactagtaaaaaatcacatagctcagctaggaattgtgaggatagtgcatacatacaaatttgaaatgacaccaaagatggaacatataatggtctataagaaaaggggatgctaaaataactatattatctggacttggccagatttatagattgtatacatcttgttgctggcaaatatcctgaaaagcatcgaattggaaggtacaagctcacttcatccatatcaaaagttcacatgtatattttgatatattgatgcacctgtaatgcaaaagtgtattgctcagatataaggtataaccaagataagaaatccaataagaaaattttgtccggaatcctttattataaaggattaatacctttgaaattggggcaatccgtgagacttttggaggaaaaataatcatagggttgtaccgcatgtttctttcttcctatgtctcatagttgttcctatgttttcttatgtgttattcaaatgattttaaaactttgcctataattttatatttttctttcatgtaatgtgcatggcatcctatccatgtgttttcacaattttgcattctgaaggggctttagatttttgtatccacattgatactaagctcctcttaagtatcttacattttcttctaaattttatctctcaatatcttcttttacctcaatcccagaatataatgatttgtagggttgaacataagtattaagtaagtaggtggaattaaatgtggaaagattttgattggtagagaggagaaagtaggtgaggaagttgttatatttggaacaaattttaaatactatgttattatattttgagatagaggaagtaactcacagtgaaaaatataaaaatacatgagaaagaagatatttataaatgtacgtaaaataatatatcataagttaaaatttactatgtggcgctctaactttgtggcattggacatatgggacactaaaaaaattatgtcactaccattggacacttctatttatcgaagcacactattttcactatataaatatatttggctcaaataaagactcttttacaaataacgctttgtgccccttagccaaatcattgcaccaattgaattgccgattcgagacctcaaatcccttgccactcccctccccaaattgaatagccacggcttcaccctgatccgtcaacaatgttacgtgcctccaaatggatccaactgtcaaacacaatgctatgcacctctgccacagaataagcatatgaaaccatacaatttttttcagcaaggcacaatataaaattgtttttcacaaaattaacattttcaatacaaataatactttgtgcatttgtgaccaaagtgcaaaagagtagcactatacatacgactcctccatccgactggtgtccgactgaaacggctgagcaccacactaagtgaaggcgtgaggcttcgtatgatgttctgcatgttactgacgccgtgtacttcacagtcgtccgaaagtcggatctagtgtgttttttttaactcctcccaattccccactgcacttcataggttcaatctgctagttctcatctctgcgctgccgtgtcctcagacaaaatgcgttttcttgtgttgttggcacggtgctgaacgggcggcgaacggctgtaagggtggtgcggctaggtgctgttgttgtcaagcaaagtaaaggtctgctcctgttttcttctcatgaatcctttgctcctgtagatatgtaaaagtatattagaatcaaagcgaaaaatcatctggatatatatgaataagaaatgaaggttgatttatgggggccatctagtctctgatgttcttctgttccagattgattttgttcggttggttggaatgtggagaaacaaacatcacctttatcagtaaaacttgaattatatatgtatgaccttatgtggaccataagaccatctggtctgaggtttctctgcccatgtccttgtttatttggctgaagtgggtttggggttggagttaggatggttgtgattgctacagcataaaccatgctcacatgacaattttagcctccccgacgttgggatcgaacagcaaagggatggtctggttgtcaatcgccgtcaagctctccattagtccggcaaggaaagctctgctcctttttttctactcatgaatcctttgctcctgtagatatgtagcagcagattagaagcaaagcaaaaaatcatctgcatatgaatctgaaatggaggctggttttgggggccatctggtctctgatgctttcctgattgattttgtttggttggttggagagtggagagaagaaagcatcatttgtaccaacagaacttgaattttgtttatgcatgaccttcttgggggactatgagacccatctggtctgatgtttctctgcccatgtccttgtttatttgactggaggaagtggagtggggttggggttaggatggtggtgattgctgcagccaatacaatccaatatggaccatggccgataaatttagtcttctgatcgttgggatcatcttgtgcggattgaacagattggacgatcaggattatgatttaagtcctcatgtgatgatgatctcccaaaaaagatttgtggggtttcatttatggtttttaatagattttgtgaggtttagttaaggctggttaccctcccaactgctggcattgaacgatgcagattggcctgactggacttttagtgatgaagtcctcatagtctctgcagatatatccgttgaattttgtttaaggtttttcaatagatttgtaaggtgttatttaagatttttctgtaccttcttggcttggtatgtcttcactattttgtttgatgttgccaatttttgcttaagctgtccatcatcaatgatggatgtttgctacctactgtattattactgactctgtgacatttctagatgtattcataatatcattgagttctggtttgggaatatcacaaaaattgtgcacttcaattattgaatacctcatgtctaacatggtactagccattccaccttcatataatttcacctagtttctatgacagaccataaagtactctaaaatgtttttcttgcattgcaaaggaaaagtggggtgcatatccatttaaattgcacataatagcactttatatcgatttcttttgtcaagatttcacaaaatcatgcaatgctgttgttctgtaattgtgtcattttcatatatatatatatatatatatatatatatatatatatatatatatatagtaaatttgtttggtgctccatggtgcccgggcaccattgttgaaattgagtatatacctaattcaaatgagtatgaaactttttcaattacttagatattaacattagctactttactaactagttcaaagcaagtttgaactgaatttgaacttgtttttgttagattttgattctaggtatatagcatccatacatataattagttaggtatgtaatcatggattgtgaaataaagttaaatttgagttgttttgttgataggtataggtatgaatcgagttattataactaggtatatactcacaatttgaaaattttgaaaaatttgagtgattttgtgtatttgataccatggtgcccgggcaccatggtgccccatatgagtgtcctatatatatatatatatatatatatatatatatatatatatatattataatttaccatgaacaaaatgcatttaaaagcttgggcttgcttgcattcatgggcgcaccttttactcgtaagccatgaatggtggatgccagtgttagacatagacatgtgttggaatctgactcggattgagttgtccgatttggctcccaaaaaatgtgaagtacataaatgcacacacattgagcaatatcacccttttaggatagtgcaaatactaaaatagttgtgtgcactagtttttcttctttgaaggatgtggtattaatttccccctttcttctatcatcaggtgcttacaaagtttcagaaagtgtacatggcacaacaagggcacaacatggtttcagaatgtgttgagaaagaacaggtttcggcacaagccataggaagtaagagtagcaaaaataaggtttatccaacaaaggaaagtgctttgcatgtaaggaaacatcacacactctggatcaatgcagcataaaagaaaggctggtttaccagaatagaaacatctataaatgataaggaggtgaacttcactgtagcaaggtggaaggaagacaatgaagataacattgaattgattatagaatggtttttagtttatggggtcccaaggatatacagaaactggaaagagctataccaaattgtgtcagcaatcggtgtattgattgatgtggatgaggaaagtttgctaggcgaccgtaaggagcctttttcatgtcactttatgtttgggtggtattcaagatgtgttacatttatgatagaagacgaagcacaaaccacgaagtgtaaaaggaaggtattagaagattgcaatggccaagatcatcttgatgaatttggcaaggaatatagagtcaagtcagacaaagctattgaaatacctccagaaatactgaataaagagatgatttcagagagcagtagtaatgacactagtattgttgtttcaacacacaaccatacattggatgtcaaaggctggtcagacaaggaatttgagaagagaatcatatgttttagcggaagaggctagctttattgaggataacagatccttctaaacacagccaaattagcgagtatacgttgttggtctatgagttatgtgggcttttatctatctcacaatctgtttagaaataagttcattttaggtctctcatattaacgttcagttcaaattacatcctcaaatcataacaccaaatataatgtgtcctacaacttgtcaacttgcaataccagggtataccgtatatcgatgtcccatggaagtattgtacccggtttcggctgatgtagtgagttgactgtggttaaccaggctaagtcagcatgaggcccacgtggtccccacatgtcaacgggctagtgttcttcctcctccctccctctcttccccatcttctccagggcggtatgcaacgagaagggtgttggccagcgatggagaggagcgacagcgatggtggtggaggagtatagtagagcagtgtgattcggtcacgttgaacacgacaacaagcgcgagacggtgctcggggcctttcgctccactcgcagcggtggtagaggggaggagacatggaaggtgcacagatgacacggatgaaagacgatgtggccagggatgacggtggtgagagcgagaggctccacgaggacggcggtgctccccctcccacctttcgccctttgctcaacgacggttgcacaggagcagcgatagtgcttcctctttcttttacacagagggtatactttcttttacaaatgacaatgtgtcatttaaccaaatcacaaagatttgactgagaacctttctatctgatgacccaaaatcccttcgcaccccttccccccaaattgagcagccacagcttcacctcctgtcaacagcagctatgtcctctggtgacagaacctagtttcaacaaaaagaacatatttgtttggccaatcttgatgggtgtaccatcggttgcatcgcctaatcccatatgattctatcgttaaatcttctataattgattagaatccctctttcctttaattccaaaccctagcatgcatgtgaattgcagggtaagccaaatctatttatagccaactatagccaagttgtctagtgcatttatgttgcacctttttctccaaacatggtatctaatcatgaactgacacatgtctttaacgttcttgtgccattacacatgtctataataacctataaaacctattgcgcgggaaacgaaaaccctagtaggaacataaagttggacttgtgccattacaaatcctaggacacatctcattagtaagtcataatgatgcggaaaattgagaaactataattgcgcgggaaaataaagttgacttatgacagcacgaaccccaagacatcactcatcaatagtaacctataattacacgggaaattaagaaactatcgttgcactgaaaataaagttggagtccttaaaatacagatctcattagagcaagtttaatagtatagccaagcgttagctcaaaatcatctatagctaatctaatagctcattcgtacaatagttacctataaaaatatactacaccattaatacccggtcccacctctcatacacacacaacatcttggagtctgtgttacagctggctataaatctgtagcccgcttttttctctctttttccttttcttctcgatatatagttatagctggtttatagcctgctattgtacttgctcttagcgagtgctcaagagtctcgcatgttccaacttactccctccattcatttttatcatcaaatttggtttgtacaataataccaagataatatagcataataattaatcaaaatcaatcagcactattagcctttcatctccttgtatgccgcatggactccccaattagttgtgattgcattaaatacttgaccaagatttctgccaatgaagccacaaggcatgcatgcaacgcagcatacaatgttgtgttcgtttgcttgtgttgtaacaaattcccttcacacggaagagatacctattagcatatgattaattaagtattaactttaaaaaacttaaaaatggatcaataaaatttttaaaataacttttctacataaacttttttaaaaaaacacatcatttaattatagcgtgtatctggaaaacgagtgagtgaatgaagttggaaaatttgtcaaaagaacacaaaaacggagtgaaattgggaaaattgtcaaaagaacacatggcgtttaacagcttgcccgagatttctgccacaaccccaccaaatacgacaatcaaacggaaactttcgtgttttttttaaatacgatgatcaaaagagaacagagagaatatgataaattaaatagcttaccattatctaaaaaaaacagcttataaaacccaataagtactcaagactcaagaggcagtctcagcctatttttcctttcctttcattcaaggatgcattcgtaggtactctcggtttttcagtttactagttgccatccaaatgcattgtactattgtagtactaaaattcgtaacgaaaatatagaggaacctgttcacatgtcaaaactggtagcaattaaatgctacgtgcctaaacaggaagcaaacgtcacctccaaaatggatccaactttccaacaaactgctatacaactgttgccaccgaataagcatatgaacacatacataattctttgcagcaacgcacagtacaaaattgcttatttcacaaaactaaatttccattacaaataatactttgtgcatttgtgaccaaagtgcaaaaaaacacacccggatctaggttttataatccctcccaattcccaaatccccactgcacttcacaggtttcaccaactcgttctcatctctttgcgctgtcctccggcaaaaaaggcatttcttcctcctgttgtcggcgcagcgccgccacacgggtgctgtgacgggacgccggcggcgaggggcttgcggggtggtgcggcggccggcagcggcgaggtgctctggttgtcaagcgccgggaagatccatcagtcaggcaaaggaaaggtatatgctcctgttttcatctcatgaatccttttgctcctgtagatatgtagaaatagattagaagtaaagcaaaatggaaaaaatcatatgcatatgaatctggaatggaggttgattttgggggggcatctggtctttgatgtttcctgattgattttgtttgtttgttaggagagtggagacaaacatcagttgtatcttagaacttgaattatatatatatgaccttatgggggccatctggtctccgatgtttccctggtcctgaatcctgattgattggggagtgcatagacaagcatcacactgatagaacaagaattatatatgtatgaccttgtggggtaccataagatccatctggtattctggtctgagatttttctgcccatgtccttgtttatctggctgggggaagtggagtaggggttggggttaggatggtgatgattgctacatccaatatagtccctatggaccatgcccacatgacaagttaagcctcttgaccgttgggatcgagtggcgcggattgacctgattggacaactagggttaagtcctcacttaacaatggtttctgcaaatagatttgtggggtttcatttatggtttttgatagattttgtgaggtttagttagagctgtttaccctcccaacttctggaattgaatagccagagattgatccaactggactactaggggtgaggtcctcagtctccacagatagatctgtcggattttgttttaggtttttcaatatatttgtaatgttttatttatggtttttctaggctatggtacaaaagatgttgtgctttggttggcttggtatgtcttcactgttttgtttgatgttgccaatttttgctgaagctatctatcatcaatgatggatgtttactacgtactgtattattaccgacactgtaacatactgacatttgtagatgtattcatcattagcttattcattgagttctggtttaggaatatcacaaaaaactgtgcattttattatctcctgtctaacatggtgcttgccattcaactttaatataattgcacttagttgttttgacagcttagaaaaactagtctaaaatgttttcttgaattgcaaaggaaaaatggggtgcatatccattttaaaagagcataatgaccactttatattgatgtctttgtcaagatttcacaaaatcagataatcctattgttctgtagttgtgccaatattttaaaacatatattgaaatttacaaacagaaacaatgcattctaaagctttggcttgcttgcatgcggggcacagcttttacttgtttaccattaacggtggatgctagtgttacggtgttacctagacatggacatgtatccgaatccgactcgggtttagttgtccgacttggctggagcaagtggagtgggggtggggttaggatactggtgattgctacagtcctaatatactccctatggaccatgctaacatgacaaatataacctctcgactgttgggatcaaatggcgtgaattgaccaaattggatgattgggtttaagtcctcatgtgagggtggtctccacaaatagatttgtggggttttgtttatggtcttttaataaattttgggaggacttgtttaaggctatttgcccaccctttcaaattgaacagcgcagattaacccgactgggctattattagtgagaatgtgagatcctcacatcacgacagtctccgcagatagatctgtgagattttgtagatatttttattatagatttgtatggttttatttaagctttttcgggctatggtaccaaagatgtaccttggatggtttggcatgttaactgttttgtttgaggttgccaatttttgttgaagctagcctatcatcaatgagggatactacctactgtattactgaggctgtgatatttctagatattcatcattgagttattcagtgacaacttagagaaactactataaaatttatttcttgtataaattttaaatggtcgctttttattgatttcttttgtaaagattttgcagaatcagttagtcctatttttctgtaattgatccaatagagtgaaatttgcaatcaacacaatgtttgccacataaattcagtactacggttgcaagctatatcattgcatctaatatgcatttaaaagcttgggctctgttgcatgcaggagcgcagcttttactcatataccattaatggtggatgctagtgctacctagacatggacatgtacggtatccgacttggatttagttgtccgatttgcacccccaaaaaatgtgaaatacattttgaattagacacaattgacagaatcaaacacagatgcacacttagagaaaaattaccctttacggtagtacatttgttttcttctttttaagtgtgtggtattgatttccccctttcttttgtcatcaggtgcttacataggtgatataaacagaaaagtgtacatggcacaacaagagcacaacatggtcacaaaaggcactgaaagactggttgctggcgcacaactatttggccattctacaaggcaaccattctacatgattcaaccttcggaagaagttgttcagaaggagaaattctattatcactgcctactgatcacatctgatgtcagtaacctggacctgagaaaagtgaaagttgaagtaagcaagttttggaagctgactgactgggagataaggacagaaggcagacataatttcctagtgtccttgaactcagaggatgacctagtaagctgtttaaagattccaagaatagaaacatcaatagatgataaggaggtgaactttactgtagcaagatggaaggaagatgatgatgaaaacattgaattgattagagaatggattttagtttatggggtcccaaggatatacagaaactggaaggagctatatcaaattgcatcagcagtcggggtattgattgatgtggatgaggaaagtttggaaggtgaccataaggagcctattaagttaaaggttgcattgagaggtgtcgatgcttctcctttctcatgtcactttgtgttcgggtggtattcaagatgtgttacattcacaatagaagacaaagcacaaaccacagaatgtgaaagggaggtcttggaagattgcaatggtgaagatcatcctgatgaatttggcaaggaatacaacaacaagacagacaaacttattgaaatgcctccagaaatactgaataaagggatgaatttggagagcagtagtcatgacactagtattgttgtttcaactcacaaccatacattggatgtcaaaggctgctcagacaaggaattagaggcaatagaatcagctgtattagtggaagagccaagctccattgaggataacaacataagtgctccagtacccactacaaccatcatctctgaaaagacagcagaagacagtccccgggctggaagggagcagtccataagtggaagttcaactagcatgattggagacacgctcttcaaaggtgagtcaaagtttacacaaatcatgcatggtatattaaatatgtttgagataataggataatccatttctagtttctccaagaaaacattaataggcctcattttttttatagttgacatcatcttctttatgcttcaccagcagccactgtgatccactccaagaaaacaactgaagacataccaaaagctgaaggggggcaatccacaagtggaaattcaacaagcataattggagaagaacccttcagaggtcagtgagaattctgtattcaaaaagtttgtattttttttctcaaatacagagaaatttgagcatcattatattaggaagaagaaagagggggtagaaccctgagtacaaaaccaaacatgcacacactgagatctgcataaagtttcttttgttataaggatttgctttataaggataatacttctaagtaaaaaggaaaaactaactaattctcgattttttgaaaaatgtagttttagcatgtatgtaggtgaatgtgtcggctacactaattttagcatatatgtaggtgaatgtgtcaggtacactaggataaatagttacccttttgttgattggcattatgttcataacaattcccttgaaggtatacaaaaaccacctgtcaagattgtgtatgcaagaagaaataaaagatccatggagaagcaggattacaaaagcttcctagaaaaacaacatcagaaggaaatggaagcagctatagtgggccaaaggcagaagtcggatgatgagtctggaggagatggaaacaataaagacagcaattcgattgctccatctgccattgcaatcaactctaagaagaagcaaacaacaaaagacattgtgacaactcaaggagcacaatttatcagtgagagtttaattggagaaactcagacaaaaggtgagcgagtatcctgtttatgcaaagtttattgtcgcgtattccttatacctgttctaaacaaattgttctattagaacttaaaaggaaaatgcagaaacaacattttattagaaatttctgatagaacagggtaaaccatatcgaattataaagtgtaggattagaagtatcttgttattacttagttgtgttgaactgtccctgattgtgttggcatggctggaacaggaaccggaggagctcagtttaatgcaaatcaacacatttctaaaatgagcaaacagtatgtgatctacattttcctttttatattattggattttgtatttatattttttcatcatatatgaatattcaattatgtccaacatgggaatggcatgatacggactaactcgaaattccagggaacacaatgaaatctttaagagtttcaatgagatgggtctccaagaaagcctactgaagggaatatatgcatacggtaattcttatttatcttctttgtgtgtgtgtgtgtgtgaattgctgagacagtgtaccccttgcctctaatctttttctttcaatgacttggcctgacgccgagtgttgacaaaaatgatgctccgtgtgatttccatggtatcgaaaagaccacacaatttgtccagcttacagtcttccttctcaacgtgtgatttccatgtgtgtgtgtgtgtctcagcagttctatgttaacgttgagaaggaagactgtaagctggacaaattgtgtggtcttttcgacaccatggaaatcacacggagcatcatttttgccaacactcggtgtcaggccaagtcattgacagaaaagattagaggcaaggggtacactgtctcagcaattcatggaggcacacacacattctaggcagcaatttttatttggcagagcttttacaagaaacccccattgttcttatcccttgatgttatgtttacagatctggataagccttctgcagtccatcaaagaggaattgtcccactatgcaatggtctggacattatccagcagtcactgtttggaacaactgtgaccttgtgctgtggtattctgcaacgactagattatgcatctacagaatgccaggctttggttcttgtaccaacacatgacttagcacatgagactcaaaatgttattggagtacttggtcaattcctaagtgctaaagctcatgctttttgtggagggactagtgcccatgaggaccagcaaattctgtctactggagttcaggttgctgttggcaccccttgtcacgttcttggcatgctgcaaggtagagcactctgtccagatcacattagaatgtttgtcttggatgaagcggatgaagtactgagaggtttcaaggaccaggttagttctacactcatttgtagcaataacaaagaattactgcactgggcaacctagttacaaagcatgcactatttgggactccatttccacatgtaattcttactaatggtcatctatcatctttgcagatccatggtattatccagtttcttccaaccaaaacccagtttgggttcttctctgctagtatgtcccatgaagctcttgagatgtgccgcaagtacatgaataagcctgtggaaatcattgtgccaagagatgaagaacttgagggtatcaatgtcaagcagttctatgttaacgttgagaaggaagactgtaagctggacaaattgtgtggtcttttcgacacaatggaaatcacacggagcatcatttttgtcaacactcggcatcatgccaagtcattgacagaaaagattagaggcaaggggtacactgtctcagcaattcatggaggcatacaccaaagagccagagacaaagctgttcaggagttccagtctggatcatcccgtatcctcatcaccactgatctccgtggcatcgatgttctgcgtgcccctgctgccatcttctacgatctgccgacgcaaccagtctgctacctccgtcatgttcaaagtgggcagcatggacggaagggtgtggccatcagcttcataactagcaccgatgagcgtgtgttctctaccatccagaagttctgcaacacccaaatagaggagctaccctccaacgttgcagatctcctttgagaagcgtttacccaatagtcttatctctattgtctgcatatgttcctagttgtgttgatcaattagatttgcaattttgccttagggacacttttcatgaatagaaatcttggttggaattgtatggaatttgaacttcgatttaccagctgtttatcatcgctctattatatattggctggacgtgcggattcagttgttgctcgaaatgtttatatgtatttattcattattcttaatgttttgatttcttcactatgaccatactatgtatgatggcagaacatgtggtacagacacaaatgtgcaaatgtgtttgctgatcagcaaaatgtggtgcgcacacatattggcatgtcaaactattttggtcttctttttaagactaaatatttgtgggcttggctagatctttacaagatcagccgaaggaaatggccgattaaatttcattaagattgaggatatatatacaaatggcttggctaaattcaaaacaaggctgatgggaataccaaattagcatgtcattgcaacacaagagagggacgcattaattaaccacactgctccaactcaagacaaaaacactttccatccaaatcttagggcgccatctagagttgtaggcacagcacgaacgtgtaccacatccacatccatgattaaattcgaaactaaattattacgaagagatcaatgatttcgttctttttttggcaaaatttttttaatagaagttaaaaatcgcagcagagcacacgcgatgcacaagcaatttaaccatctatacagagtaagatagacagatctgaactcacctgatcgaggagcatggtcgctgcacctgcaccagatcccagcacgcggcgacgacgggccagcttactcctcgggctgctcctcacgcgcgtgcagaataagaaggatcgccggcgccgccgacggcgaccgcagctcagcgaccatgccgccggcggcgacccatccgcgagcgcctggcaggttgccgaagcaaagcaaaccctagcgcgtgtgctcggacgaaaccctagtggagcaagggatccatccacccaccatggatccgatccgaggctgctgcttttgctcccgcgattctctcgaccccgagctgagctcgcatcgcagtcgcagcgcacgctgagctgagctgggctttgtggtcctaaaaatttggaaactatacttctcatgtatttctatgctttttattgggaactttggaatataagtgggccaaacgatttggagtatttgtgaacaaaatttcaattaaaacttattaaatatatgtcagggttatagatatcatatacctaatagtagttgactaaatctcgacaggacccaccacataccatgtcctatacggaaacaacctacggatatatgaggagttccggataaggaaaggcaaccaaagttttacatggaaatgccaaggactactcggattgtatccatattggtttccctagttctacttggacaaggggacacctatgggtataaatacaagacccctaagaggagaggggacacacccgcaaatcaacacccaccacaatatacagaacaacagaagccacaacatacaagccaacatacgccaagacaagacgtcagatatcgacttcagggataagcacgactagtcccctacggtgtcaccggatcctgtcaggagagacgaaagcgttatctctgatctcgccgggcacgaactcgaggaggaagactaccctgttgtcgactacgagtcaatactacagaccgccaagtcgacaacagttagataggttaccccaaatattgtactagtgtgattatgataaataagagcaatgaccggcttcggccaacaggatgtagggttattacctaacaattcaggggcccgaacctgtataaaaatcctcgtctctgtctcttttacctcagtctcgcgtatatcctagtaccgatgatccctataccatgcaaataccggaatcgcgacatcaaacgtcgacaatataaatacaatataattgtagtataattttattgtaactcgtatgtaacttttatatagttttgaatcattagaggtcctcattggatggccaaatgctttgactaatcagccatttaagcaaaataagctaaccaatatgcattgaattttggctgaattggaggcagcggctgatcagtcaaagcttctggccatccgatgaggccgagatttaattcaaattcatgtatagcgtgcgtactctgtctcgagacatgtgcttcgcagaaataatatgttaccacgggatttttaaaaattacatttatactatttttatatatgttaaagttttagaagaaaatttgctgataaatgtttagatagccctatgaccacatatttaccccccttctgttttaaataactgtcggttttaccacataatttgctggtttggttggtacaaaaatttgaactaaaaatctcggatgttttgccactctattaaattggtttttattatttgcagtggtgggcatgggattttgacgatggggggcataaagttaatcaagcattgtcctgtggggaaaaaaatctgaagcttcgtgacagcgaaattgaagtgcaggcttttgttacttgtgcaaataaaaattatttgtataggaaatatataatagctaagaaaaatttcaatactcttggaaaggctgatttgaggttgaagaatggttattttggcacaacaaatggtatattccaacgtataataataataataataataataataataataataataataataataataataataataataataataataataataataataataataaataaataaataaataataatctagtgtacacaccatgcacaataactaaaaaaatatcataattctagaaaatttatatatatatacttttagtagtattatatctatgtgtaatgggaccatttttaagttcattatatataggagcaaaagaaaaaaacaaatctaataggtttatacttttaaaacttttagattttttatttttttcagaaaatataattaatgaggttaagattaaagtgtaatactattggaactacatgtacaattttttctataattgttgtaaaatttattagtacgtgtacagtgtgtatacgagttcgtgtacacatatattcccatttatacatattatatctattcaatttcatgttctttggcaaaaatatttagagtacaaatggggctataccataagcccgccaccaattatttgacactagctcacatggcattgccacattgtgacaacataatcaatgtagcaaacggatagagtaataaaatcattaatatttttcggtctatgtatgaagccttacaaacgaggtttaattttgctagtttaaatgcaacatttcattttttgcgcggttgaaaggattgcctactcatgaatcatgatcgccacgataaggtccatgtaaccagatggttaaatgtccacgataagtttcacatagtttaaatgtgtatcttacattcttcttatttaatctaaatatgtgtcttacattttagaaaattgagtagttttgccttttattcattgcgttgtcatcaccattgttggtgtactcgaggtgagttttgggcatccaacctcctctcagcactctacctacttactttcaccaacaatgatgtccagatagccaaatggtaagtgtagttttatatctagtatcccgccatctaaatatataccttcctccctctgtccctttaaacttgatgttctaacttctggttagagtacgaagatagtgcaaaaataacatgtactgcccctatacttctatcattactagtactagaccttaatgtctgctggtttgaggtgagagagcggtgagtggtgtggcagaacgtcagactaattgagttgtggcagagtaggtctgaactacgaagacaggctcccagcgacactctttgtgggacattgcttcagcgctaaaacgacctccttttcgggacggagggagtacttttttatagaaaaatgtgtatgttacattcttaataaaaatgatggttttgcctttttatcattgtgctacgattttggtttattaatttacatgggcagaattttggtcatccaacctccactatttcttatgatcaccagcggtgagatacaaatcaatagatggatttgctcaccatgggcaaggagaatggctactatcaaaatattaatccatatgttagagattgtaagatgtcttgtgtttgaaaattcaaactaagcgagctgttgaatttccctttccacccctcctccatccaaactaaggactcctttgttattggacaactagtgttgtcgctcaccatctggaatcttcgatgccacctccagttgttgacggctcgatgcaactcatatgtggtcctatctttcttgcttctaccgacccttggtggcacatctcgctgctcacggtgttctgacttgacattcacccctgaccctggcagcgcaatgctacttgttgctatccgccaccttcattctcaccatcactcatgcagctaggcagcacgcaagcaggtttagagcaggcaactagagtaccatactttgttaacactgtgccacacactgtcagcactacaccccgggagactgtcagcactacaccccgggagacagttcgcgctcaccacccgctcatgtatgcccttcggtcttgcctcaacgagcttcgggcgagattcttgaggagaaggttagtttaggaatatgtagctagggaataggatattctacaatctagtagtagtgtaggatggtcataacgtcttgcaatctgtaatagagagagtacctcaacttggatgtcttccatgtaggggtcgtaatgggtctaggctcatggatcctttcataacctacctaagcatcgtatattttcatgttaaaaatgactaaagttctagcccaacctaatatagatccaacccatccctacttctgtatttacaaccagacttttttcgcagagatatgtataggagagcgctacaaatcgggcgtttgttatttgcaaaacattgcacggtgttgcaatatagtgttgcaaaatgtttcatatattgcactactcgatgagaaatattttagatgttccatcgatcgagggaaaatgtttcattgcttgaacgtaagtgcttcaaccaaaacacaacattcgaaacatattgattgcaacgtatgcaacattgactcaaaacaaaatgaaacgtcttaatacaatacaatatagtgtaaaaaagtaaaactccaacaaaatagacccaccttcatcttcttccactccagccactacaaccgccaatgcatccggggagagggaggatgatcaccaccgtcgtcctatctcaccctaccccgtcgtcggcaatgacgaggtccttcaccaccatgtaaccaccgagaccctaccccatcgtcggcaatgacgaggtccttcaacaccacgtagccactgagagaatggcttcgcattgttagtctttcggagagagggcggggggttgattgtcacatcatcctgtctgtcgtcggcaatgacaaggtccttcaccaccatagccaccgagacaatggctttgcagtgttagtctttaaggaaaataagaaatgaaggaaacgtgtggtggattacgtagttgcggtagtgagaaggacgattacatccaatattttggagtcatcaagacgtccgtccctaagcgttttcaagatgcctcttaagcgtatctagacacaattgaggtggaagaaacggccatccagccatcccggcagtctatctcaagggcaaacaatcagcactcaatcacactctcccatgatcccatcaactcatcacattttcacatcagcctcgtacacaggttactgacaactgagtataatcagacggacatatgtattgcagtggaccatgcattcttcactgccgtaagaaatacagagcgcagaacaatgatatacagagattatagcagcaaggtcaataaaaacagtcaaattagaagatttaagcaaatccgttaacggttcccttacatataagggcagatggcaacagttagctgcttgcgaaggcaatgtcactaccgcacaaaatataataggtcaatcataccaatactgttcctaacacaaaaggctttgtttgagggttctaattctctcagcatatgaaaactaacggaatacaacatagctttcatgtgtagcttctacagcagactacggatgggttcagcgactaaaattacacagttggtccagttacgagataatttgatgaaactaaataaatgttctggtgccgctgattgagtaacccaagataaaacgctgattttccaggaggtgcacttattgtatcctagaaaaaactctcatgagttcactcatttcccatatggatggtacctgctggaaccccgcccaccagcacctcctgctccagctccaccataactgccatatcctccagcaccaccataggcacccggagcgccaccataggcaccaccaccataagcacctccgccataggcaccccctccataggcaccaccaccatatgccccataagcaccataggcacctccatacaaggagccaccataaccaccaccatatcctgatccaaatccagcattacctccatagccataccctcctctgccataaccatatgcagtactatcataataacctcctccagctgatcggtaaccagcaccatacccatagccaccactgctgccactgccgccaccaccacctccgcctccaccaccagaagcagcagctccaccactacggtatgaactgcggtaaccacccccgctcccatgactagatctcccattactactgtgatcaccaccatgtttctttggctcagccttctttatttcaacctgaaaattagaagagtacaaaatagagaagattatcaagctaccgttcaagggtacaacaaaagtcatgttgaccaacgctaccacttatgagattaatttccagatcatttgacccagcaaacaattgagtagcaaagcacatgttacagacaatggaacataaattgattagtatcgagaaaagatgaaaaggaaatccacagaaacaccaactgctgctagatgctcaggcactccattcataattgaaagcaaccttgacaacttagatttacaatgtgacctgtctatttctttcagcatatgagcgtctctaagtttattaccattttccctttgtttccatgtttcctactaaatgttcatacagaaccagaaggcgtgcacatgatgattgtaaacgtgtttaacacaagtcgccaagttggtaactacccaagaaagtctgcaaacaattaaagaagtttctaacctgctttccaccaaggtcacgcattcttccctctgatataaccctttccacagaatcctcactttcaaaagtgacaaaaccaaatcctctagaacgcccagtgctatgatcaagcattatttgatgttcaacaatcttaccatatggggagaagtgctccctcaactcatctaaaatttaatatcttgtcagttttcattgtaactacaaatcgttgaagatttttatctgtaagtctaataagtaccttcagttagtgatgaaggtaatccaccaacaaagattttccttgtctttggaccatcttttgatgacatttcttcccttgggactgtccttttaacttcaacctgaacaaataaaagttaagcaagataaagagaagccaagataaacccaaagtgcgactttgcaaaagagtgtcaactgtagactgaagtcccacgtaacggctgatctaaatcaagatgtcctaccgttcttccatctataacgtgctcatcctccaaaaccttgtctataacagatggatcggaaaatgtaacaaatccaaatccacgaggcatcttagtatgcttgtccttcataattacagaatcagttatagccccatacttctcaaaatgcttggagaatgattctacatacaaacaaataaaccatacagctttgtcaaatgggaaaaaggaattatcagcaaaagaaagaaaattgggtaggcaaacaacagagtattgaagaaatagcatggtgagtcgggattaggtcatgatagaaaagcaaatcacaagggcagaaagcatagagatctccattcagaaatcatggataatattagatgcactaatgcaagtctacatgccccgaaagctcgcactatcacttgttacaaatcattttaatctggtcacagaaagcaaatgcagtgtaaatatgctagcaatcacaggattaaatgatcatgtgctagttattagtaccattttctaccttgttaatttgatataaataagcgaatattggcacaatatctcatagtacaattagtcccatatcgatcaacaaaaaaaggagtgcaatttgagaacccacagcacaatttaacaacaaaaatccatatacacaagaactagaagacatgagagattaaacaagttccttcttgttagtatacctttcatacaaatatatggacttaagtgagtgaacagaatacagatggtgcaatagaatgcagaaaacaaatcaacacaggatgcagaacaacacagctatacaggtaaactgataagcatatacatccatataatggtccccaaggcccaaactcttgtggttcagtatgggtctaatagtattttgactaaatatcaaaaattaaaaactacattcaagagttatgcaaagagaagtctggttttggcagcgataaacacataagttatttggaagacacagcaaccgtattgtgcacacaaatttgtatgacccttgtgtcacacagatcatactgtccctgctaaaacgtacaaaatgcagaaacgtatgaaacctaacaggctcacaaacatcacagcaccaacacaaagaaaccataaaaacaaattgattaacctaagcccaaatcacaaaacaacacaacataaaagggcagttttggatccactaaatttatatccaattttgggcagagtaacacaagtcatatcttacaacagcacagtaacaaagaacgataaatttcagtaagaatgccagataatatcatccttatcttgagcctactattactgcgtgtttttctaccaatgttactttcacaattttccacaaagatgctgtagaacttcctccacaccacagcttgaagctggaactaacgtaaacagcgtcctagaaaaaaagttaatcctatggtgcgctacgagtactaaattataataaagcaaagccatcgaccgttcaccttcggttgtctcccaagcaacgcctccgacgaaaatcttcctgcaaaaaaagaacaaaacagttacatcagctctcaaaccccctctcccaaatccgaaaaatccgaaacaaacccccaaaatccctagcccaagccacgaagccacccaccccgacgagtccccgccgggcgccctcccgtcgtccccgctggcgtcgccatacgcgccgccatcgcccccatcccgaccgccgccgccccgtctaccgggtcgaccctcctcgtcgaacccctccacctcctccacctcctcctcctcctcgtacccgttcatcccgtgctggttctcctccgggtaccccgccatcccacacaacaacaacagcaagctcgcctccgccgccgccgccgccgacgccgatgcccctgcaaccgggcacagaagaaatctgagcaaaagtgacgaaaccctagctcgcggaggaggaggaggagaggggcgcggcggattacctcggaggcggatcgatcggaggaagggagggtggtgggggggtttggaggtggaggaaaccctaggcttcgcgtgcgggtttagaggggggtgggagattggatggatggaggaggcggcggcgaggtgagagggggggagtccaacgcgtaaaccgctcgagggctcggggttcggggcttataaagccagccgtgcacgcctcctcggctcctcgcccgcccaagcccagcgaagtggaaaaacaaggcctgaaggaggcacgaatgcacaggataggatacagtcgaatgaggatcccctgcaaactgcaccacgcgaggggatctgtttccgatacagtcattcgccgtattaacttctaaagtttttttccgaacttctaacttttttatcacataaaaacttttttacacatataaacttttaacttttccgtcatatcgttccaatttcaaccaaacttttaattttgttgtgaacttaacacagcctacctattgtgattaaaatttctcgtggcagattttattgggcacatttgactattcaaaccggagttgttttggctgagcaaagtagtatacactcgtaatatgcatatattcatatctatgaacacatgtacgcatactttgccttttttttatacgactgacgtattttttattaagattgtgaaaattttacatcacgcgttacaagcagagaggaaaaacggcaagaaagaaagaaagagtgctagatggttatcgctcgtaactaaaagaaaagaacgaccggcagaagggggtagctaggacagaagcccagtcactcgctataaggttgcctcttccgtagcggttgcagccaccttgctctaggtctgagcttcgctattaagcactctattgttgtgctcctttcacattgactaggttgcaagagtgaccactttgccaaatgccctctcctgaggttgtttacaatcttcggacgactctcatccctccagctcatgaatgaggtatgcgccacggggaagcagttcgggcgggccaatggtagtaagcacctttcactagaattgtagggattctgagcacgcaatgaggatatgatcaattatctcctcctattgatcatagaagacacaataataaaaattggtggggcccatttggctccacatgtcatccctattctctctatcctctctctcgcctgggtggagcaaggtgggtggtggccggagcaggtcagctaagcagagcagcgtggccggagcaagccggcacaggcgaggggcaaggcggtggaggacgacgacaacaacgccagcgccatggacgatgtcgagttggggttcgttgacccagacatagtggaaaggtgatcccaccaccgccgttgctgccatcgaggccgtgccgaatgaggacgtcacccgttgtactcctcctgtgtgccgccgccctgggagatgttcgtggccatgtggcccttctcaccgcacttggagcacgcacaaccgcttcctccgctattgttcttgctgatgcctccatagccgtggtcgccctcgccgtaacctccgtccccgccgccgctgggatgtgatctgccggtgagcgtgccgccacctggcgtggtgacgtccacgaccttggtgtggccgtcattgccggatccgatggataactcattgctgtagttgagctctagtagccgttgaacttgagggggggcttgtgggtgaacaggtcctccgccgccctactcacccttcccactcccattcacctagggcgacctcgactcctacatctcctcgaggcggcccgcccagtgctttgcaggtcttgtcacggccgccacaagcgacgtcgggaagggctggccgccgccccctgcccttcgccccgctggtcgccgcccttctccctctctgtgtgcgcttatcggctgacaaggaatgtcgaggagggagcaaggatggccggagggagagaggaggaggcgctcgccgtgtaggtagagagtgtgtgggactcaatgacatgtgggtcccattgttttttgtctgactggtatgtgggccccacattttgttttaatatttaacttttatattttgctttcagtgccacatcactgtcacgtaggatgagcactaagtcaaaccagccacgtagacgtcatgtcagccaaaactactgtctaaaccaccgagagatctcgtctgcaccgattttaataatggagggacttgttgtatatggtatcgaggttcagggacgaaaatcgaactcgttacaaaggaaagggacctcaaatgaacttattccaaggtaaaaagtcctcttcctccctccacagctaaccatgcctctcgattggaggagagagggtgggcctactgggcgacagcccgcggcccagttatccccctctccacacctaatccaacctttctctctctctacctaatctgattatcacgctgtttctgtccacctacccatccgtcaaccgtgtgcgcgagcgacgactccctccggcgactcgctccagtttcctctggcttcagcgacaggggagcggggacgacggcctctctccggcgacctccctccgccgccaaatccacatccaggccagcttccattcttctccctgcattgtgcagtccactctgagaacgaacgagtcaaactcgactactcgtgttgtttggagtagtttattgctagtactggttagtactgtccatctactgcgattataatggatagatgatgaattattgcgtgggcccccacaactaatggacgtggccataaaacgcgctcgatttctgtgcccgcacgtttcgtcctcctccaattttcacaaccagttcgaacggtttcaatttcctcgtgttttcctgcctcctcctcctcctcctcgtcctcttctccccccatttcccttgagggcgcagcagatctgcggcgaggaacgacgaggatggtgaaggtgaactgggagctgcagggatgctgcgaccgcgaccagaagatcttcatagccgccgtcggcgtctccaccgtcgtcatcctcctcgtgagcacaccctccctagctccgtccttctccctgctttgcttggtttggttgtgttgtgttgcttctgaatcgggttcgttgtgtgtggggggtttgggtttttgctctgcctttggattgcagctgtggaggacgttcctgctcacgcccttcaaactcatcaccgtcttcctccacgagaccagccacgccctcgcctgcaagctcacctgcggagatgtaagtaagcacacgcccttccccacttactacttgttactgcgcttttattgcggccgatgatggatcgtgctgtttttctttttcttttttgggttttgggatggtatggtgcggattgtgctgtgatatggtgatattgtcgtgccattgcaattcatcgaattgatggtagtaattcaaggtctgattggacttgatcgtgtaagggtgggaagcgaggggggttttgcccatcattttgtgttggtatttggtaggtgattaggtacctttcagcaaaagtaggtatagtgatggttgattccatatcgcataatgtggagggccttcttacttttatttatttttagatggggaatgtttgtttagagtatatactatgcatctttgcattcgtctagaaagaaggatttcaattataatctggacattaggaagtagccttttttccccctcctccttttgtccacaattatcgtttgccacaactgcacatttcatcatcattcaattgtggagttctgttgaaagattgtgaattttctatagcatagtcatgtttggccacttaggaattttcctatgctccagaggtttgtcgctaggtgacttcaaattgaatcttgccttacattgtttgttgcatgatgtgaacaatgcatgcatccacaatccctcggtttgcaactagggagataactgcaggagattaggtgtaaattaggctatggacatgtctgttatagccaatcatgatgaacactcattctagttcaatcgtcactgtgttaatgaactggagttttagaatttatatggttattatgtgtactgtagcacatacctaggctttgcttttgtttctcccttattttccatgtaaacttccttggatttattgcaatttattgttgaagagcgccaattttatctgtgaaccctgttataaatacttagttccttgaactagtaggatattattacttcggacatttagtatcttcttttgtttgtttagggctgtccatttgttttccaaaacttaggtccccgtttatggaaattcctagtgctttgctggtttgaaaaggtctttttgttcactagtcacccacaatatttgctagcttcatgtgttttactgtatctggactttgacagtccctgataaaatttgcttcaaatgtgattgcctttttcaggttgagggcatgcaggtccatcctaatgagggcggtgttactcaaactcggggcggcatatattggataatcttgcctgctggatgtatatcacttatgtattcctttcagtgtacttcatttggttgtgttcatcttttgtaaaaaaaaaaggttttgctattttccaaattgattagtacacaatatttaagagattggttctggataaacaccaatcaagatgataatgtctgaacgatctctcactatattgtctaggctgtcctaggttcctgtggacacctcaataactttattaatacctttcaaccaaaaagtgaaattattactttgaaatttttatataaatacacaatcctattatcctgtttacccccttgttgattttatgctgtacatgtttcctttaggtgatacttctttggtgtttcattgttgtgaagtcattgttttgttccatgtgcagatctgggttcatcattttggggaatggtcttcatactggcttccacaaatctcctcactactagaattgcagcgggttgcttcattcttgcattaatcgttgttctttttgttgctaaaaatgtatgtccactactttgttgtttcaactttgatttctttaagtgtcttttgctgcttgttttcacacaataatcatgtgttgttatctcttgctcggatcatgcagtggtttcttcgctggctctgcattggtacgtacaaagatgacctcatcttcgtttagaagtttgctacgacacatactatttacattgaaacttttcaggtttcatcgtattccttgctgttgtttgggtcattcaagaattcacaaaattccatagtctcaagtatgtaattttattcataggtgagactgaagacgcccccccctccccccataggccaatatctttttgggggttcggttatcattgcaaacactaattgtatgttagaaagtagttcttatgtttgttttcatcttacaggtgtgatgaatagcttgttttcagtctacggtaagaacaaaaatcatactgatgttatttgatgatagaataagtaatggattaacaactgcacttgttagtaatcttgttgtgtttatctagatatctatgatgacttgatatcacgaagagttcattcaagtgatgctgagaaatttgctgaaatctgcccatgtccttgcaatggttgtgcatggggtgtcatatggtgtgctctttattcagtcatgtccttgtatttcgtgatattgtatgatgattatcctggcactaaaaacttaattggaattgctattctctgtttcaggggcttcatctcgtttatctttctttgcgcatcaatataccttggactggttatattgtcttgaggtaattatgtcattatattattacaatctgctatgctattgttgtattaacatgcttgttgtcagagcaaaagcagtgtggcacccaattacaggaggcttagctttatcgtaggattaaactattacaatatgcggtgttacaatatttttataacaaaataggcatgcggtctgctgtgtgaatcatgacataacatgaaattaccttcacctgacaatttaaagaaaatgttttggtaaaagaagattgtattgatagctaaaattggcaatgagttccattccctttcaggcactagctagataaattgaatttccttgttcatatgccttccaattcatcaaagaatttaagctgttgagaactgtaatatatagctcagccttgactcttgaaggataatccctgtttttctctttggccttcaaggcttcaatatgaaggctgacgtttcagccttgtatgttttgaaacaatatgttggtagtttaactctttagccttcttttttttttttagagaaaggcagtactgcccagctttttatataaatataatatgtctcaggtactgctctttagtcttctttgccatgtgctaacttggtgtacttttttttgttcaggattccaatcttccatataccattttgatatgagaaccaagtcaagctgtgctctcctgtatttgcattgctctggatgttggctccagcttgtattgatctcatgtgtcatgagttgtagaaagttcatacaaacggcaatcgatttatgccaattggagttgatgggatagggattagtcattcgattcttccatttagtgcttctgtagatagcattctgcttatagttcatcttcatagctgattagctgtcattttagtactatctcatctcttgaattgttactattcatcaacatatagaaatttactcgacagtacaattccttttgagtttggaccaattgtagtaactttttatcttgtcggatctaagctccaggtggcctgctttgctatttggagtttgctcactgttgcagaaaatgctaaaatgtctcgttgcacagtgaagcaagtggcttgcatagttgcattgcctcgagggaatggtgtctgcccccacttgtgcgccctcgaggcccccagtctagcttcgatggatgatactacagtatgcagttatgatttgtgaagtgttcacctgtcggggtccactagcccagggtcccaggctgaactagtgtcagtgcatatggtaaaagcagaatttgcagcacctgctggacaccatttttgccggcagtgttgctgtcctagaagttggctaatcaccgatttccttctgttgctatgattaaggtacgtcacattgaatgtttggacacatgaataaagtattaaatatagataaaaaacaactaattaaatagattgcgtgtaaattgcgagacgaatcttttaagcccaattacaccatgttttgatgatgtggtgctacagtaaatatttactaatgatggattaattaggcttaatatattcgtctcgcggtttacaggcggattctgtaatttgtttttttattagactacgtttaatacttcaaatgtgtatccgtatatccgatgtgacacgccaaaactttacacccctggatctaaacacagcctaagagcaaatccagcgatccgattgttgcaatcccactggtgaagctgagtgaaatggatgttactcctgtttggggagcttttagctactgtagcttctatcagaattagaagcttcctcaaacagtccagcttttggtccagattctgagaagctgcagctgtagaatgcaaaaaataaactagaagccagaaactaggaaacccaacttttctatattctcagaagctggctaccaaccagctgtttttcataatcttaagctcctcaaacatgccttaataaatggtacttgttactccctccgtcccataatatagcaacctagtaccggatttgacatttcatagtacaccgaatctggacatgcgtcccataatatagcaacctagtaccggtgtactatgaaatgtccaatccgatactaggttgctatattatgggacggaaggagtaccaggtagtctggctggctatggctgtagtccagacgtccactactcccgggggtagctgatcaaggcatgtgctgatgcgtatgttaccaacggtcttgcacctataatactcatttatcaaatccaactatatatattcatctgcattgaatcgaatgacccatatctcctccactccgtgtacagatcactccacccccttccccctcccctcatccccacgttcattcccctcttgcacatgccataggcctaatcccctcttgggcactcttccctctgatatgacgcccccgatgctaggtcgctgtcgtgatcgccttcgcgagccactgatcctccgctgccaggtcaccgtcgcaccttcctcaggttgtttttggtgtggatcacccaccgttgttgttcctgctgcctggatctttgctcagttgccctccacttcactacgactcggaccctggcggcggtgaggcgatcttgaatgtgttcttctatcgatttcctgtttgatctggcaatttgtttttgaggtcatcataattatatatttttgtttgcctaggggacgagggtattactcgtagaaaatcatattcaagaaagtcaatttttcagcaaatgcttgttcataagaaacttaaattgctcgaaagaaagttttagtaataaataaagaagatcgcttcatgattgttttttttacaaaagctagggggactaaggcccccatcggttggctttttttttctaataaggcaaaacggtttatcagggaataaaaaaaattataggtaaaacttatatatatatatatatatatatatatatatatatatatatacatacatacatatatatatatatacatacatacatatatatatatatacatacatacatatatatatatatatacatacatacatatatatatatatacatacatacatatatatatatatatacatacatacatatatatatatatatacatacatacatatatatacatatatatatgtgtgtgtgtgttttaacttaaaagccaatgctgaaaaaaatacgttgaaaatatatcaaaattaatctcaaaattaagtttgaaaattcaaaatttggcttattctttagcttattgggccatctgatgggagcctaaggtgttgccgtgttgggaccgatggaaggggagccaacacaagcggttggttgattgtggaagctgtcggatgtcttcatagggggaggaatatatttatttgccaatttgcgaaacaaataatagtgttgctactcccaacagttatcgggtcatgtgaatgggataaatttgaaggaaaattatgtttgatggctggtgtataggaatagctacttttttatggtttgtaagagaaaatggtaaagttctacagatattgagttctactgtaaacgagatataggtcaaacattagatggtgatggcgatgtatggtttggattttgtctactttctgatttgtgatacatgtggagttgtatagttcagaaagactcacgtaagttatataattaaaagtattataactcactcaattattatcttttcaatattaaacatatcttattttttcttgattgccaagacatatagactctcttgattatttgatttgcattactgactactatcgttagcacggatagataaattactccatccgtcctgatatgttacaacctatgataggattagacccattccatacgtccacattcgtagttgtagtataggtctaatctcatcttaagttgtcatcctatgttgccagtacatattgagaccgagagagtactagtgtcaataatcagacttgctaaaaaaatgtggctgatctcaatcggctttactgtgcgtctgattactgtgcgcgagactacgtttcagttgtgcttgttcggacctttcgatttcttttcaaaatcatctcctataaagtaaggattgcacatgcttttgctttttaacttttccaatgtaagatttaaatttacacccacttatactccacttacattccacttaggcacttacacaccacttacaaatataattactatgtaattttagaatttatattataaatacactaaatttatatatgtaatttagaaaattacaaagtaaatacacgctgactaattttttaaaaaatatgacactatagttatttctgtcaataattttcttatggtcaaactatactggtgcctgggtgccttcctgctcggtggcatcgccgaccaaaaacctagcgattgacatctcggccccaccaaactatgggcccacatgtcattccctccaataacatccgagtggactagcgctcccaactcccaagtcccaactgccagctctgcccacttctcgaagcaaaagccccacacaaaactaaacaaaaaaaaaaaaaacgaaagaaaaaaaaaagagagaggagcagccgagtcggccatggcgcggtcgccggcggcgaggaagccctcggcggcgcagaccgtcgcggtgacgctggcgctggcgctcgcctccgcggggctcctcttcctcctgttccacctctccccgtccagccccaccccgcacccgcacccgcaccgccgcctccgcctccgcggcgcgcgcgcctccccctccccgcgcggccagatcccgttcgaccccgtcatcgcgggcctcgagcgccgccgcgacgaccgcgagtgggagcgcctcgccgccgcggggctgcacgcgccggggttcgaggcggcgcccgtccccgaggactacatcgacggcggcggcggcttcggcgccgaccccgacgaggactacatcaacgacgccgcgcggttcaacctgacgcggcgggtggaggcgctgttccccaagatcgacgtcgaccccgccgacggcgccgtgacgcccgccgagctgaccgcctggaacctcgcttccgcgcgccgcgaggtgatgcaccgcaccgccagggagctcgacctgcacgaccgcgaccacgacggtcgcatcgccttctccgagtacgagcgccccagctgggcatggcggttcgatggtacgtatgcgtattcacatctctcgagctgacaccagccatccaatttttggttcattgaagcgcagcatttgcctccttagagacgctagttgactagctgcctatcttgggtgagctctcgcgatcttggtgtgttgaatttggtgatccatcagtagatttttggttcactaggtttttggactaccattaacacgttgtgatttcaattcatttacagaaagaggatgacttcacacctcaatgtaggcatcatcgattcaaccatagcgcagaaatagaactttcaaaatttccccaattttatttgactagaaatgctgttttacaaagacattctgtcatcttctttcatgaatttcctgcggggagctgatttggagtgctgtttaatgaactcttaggtcttaacttttaataaaatagacctagactattttcggctgttcttagaaaatctaattaatttacatacattctccatgcctgaactttacacatatctggtcttcggagttaggtgctcatggggaactttttatttttcctgcgatggaatatagtctccaatcgacataatttcaatccttatgttggaattaaactcttattggtattgtcctacattggccttctcagccccatatattctaatgcttgtgattggtaccaaacaattgttcataagcatatttaaaagtgcatttttgacatgtttcatcccttggtcgactagtaaacttagaattagaattttcatgttatgtacatatttaacaacaattggcatgtacaatcatcctggatagttctgtggattgaccaagttctatatattacatgaaaaagctgtgtctaactactcaaaatacacacaataggaatcattaaataaactatgatcagtttcatccaaatccaaatgttctcatttatgcgttatcaatgtgagcactaagtgtcatctttgtgcagatcataactcatccaatgatggggtgggatggtggaaggaggagcactttaatgcttcggatatggacggtgatggcttcctaaatctgatagagtttaacgagtataacctttcctctgactatctattaatcttctggagttcctttcttgttttacagtattttctttggtttactttgtgcagcttcttacatccagccgatactacgaacccaaagctaataaattggttgtgcaaagaagaagtcaggtgcatctttccctccaaacattatttccttacacatctgcaagttcatattccatttgtatcctcctcttattataattcagttccgcacaaacaaaatggagatgaaagatattttttttcttgctgaacttagagagttagaaactacaaaaaagaacaattatgaaactctagaacatattcttaggttattacttgctgaaacaatgcccttgatggagtgatgctacattctggcttgtgcatcactatgttgtgcaatggttataattggagcatttcttacttttcttacttcaggttggtgatagtactgggtattctttagagtctaggtactctgttagttgactgtgtgaaacggctgcatgcataaatgctattcattgcttgtaagttttcaatagtcaaaacaagcaggtttaggaattgaatcttgggcttcaatgaaatgtatgctttgaagtttgagcaaaaaaccttaaaaggtggtggattttaaaataaaaatcctcgacaatattcattccttggttgaggccctgcaacaatcacatcccttttagcttactttatggggtcagctggaaatttcaacaatttcaatattttaagaccaatttttgttcactattcagggaaagagataaagataatgatggaaaactcaattttcaagagttctataatggattattttactcaattcggcattttgatgaggaggcttcaacagatgactccaatgcttctgatgcacccgcaagaaaatcatttacacatcttgatctggataatgatgggtatattacagctctaatgttctcttgttatcctatataaagaattcataatttctgaggattgagttaggaggcttacccattttgcaggcttttgtcagcagatgagctaaaacctattattggaaatctccacccaccagaacacttctatgccaagcaacaagctgactatgtgataacacaggtaatactggcagactgtatctcattttactttcagggtatcttggactacctttcagtctaaagcagtcagatttttttatctagattctggagtcataaagtgtcaccagtgtttgtacagcaacttgcacttttttatcgaaacatacaacttcaatcaagtcgaatgagtgacttaacaacatgtttcactttgctggaagggtctgatgatgtgctaatctaataacccatctgctggtttctccaatgtaggctgacacaaacaaagatgggcaactgagtttgcaagagatgattgagaacccatatgtattctacagtgctttattcacagaagatgattatgggtttcatgatgagcttcggtagttcctggatggtatgtaagagacacaataatgcacattgtttgctttattaaaatcacttaaatttcactagcccatgaatttgctatgtttgcttatcagcaggaggtactcaggaatcacccacctatggaacacttcattagacatcgatgtgaatagataactcccatcatctgtaggtttcacctatgggctgcaagaacattcgagggtatataatttgagctgttctatctgttattcattttttcctttgcactttagtctagaacacatttgtctcaccaatctcgctttttctggcaggtgattccatgtataacacgagcgtgtttcatgtacacagttctataagtagggcgttcttttgtaaccttaacctttcttgatttattttcttcatatgtatgatgaggtagcattggttcttttatttttttttattattgcaaagtagaactatatttttggatcacacacttgtaaaactacacaacaagagaagtgcaaccataggctgcatatcagctttcttgaactcatgattgcggaaacctcgatcttttggaagtgttcttttttcctctcttctgcatgtgtgacaaatgctgtctattttccaagaaaaaaaagacgctgttttttttctttttgcatttgatggcaggtgcaatcaaatgatatgcaggatgttccttttctcttttttttttgaaagactattcagttcatttcaagggacacatgtttaacacttttcacacactcaattagttaactctccaaacttctactgtacataatataacttgctttatacttgagaaatatctgcaagatttctaaattacaaatttaacttgaaaatacaaactagccagatttgcaatttgctctcttagcaaacacaccactagcagattagcaacacacatatactgtacacatacttcacacagtgctaggctcaggctgaggtgagctcaggtgttggtcctcttgatggccctgagcttgacgccatggcggaaggcgaggacgaggtcgaagtcgaactggaggggcgactccatcgccggcgagtggcggaacacgtagcggcggtagaggccgacggcggcgagcttcacctgctgcagcgcgaacctgtgccccacgcacgcccgtggcccgatcccgaacgggatgtgcgcgtacgggtgcctcgccctctcctccgccgcccccgccgcgaacctctccggcctgaactcctccggctccgggaactgcgccgcgtccctcgccaacacccccggcgccagccacacgtacgtcccctgcacccacaacaacatcacaatcaagaaaccacgagctagagtacggttcttctctctcaccctatccctcaatcccaaagacatggatagagtatggttctgtgtcgattgtaagagttaggttttgaacaatcccggctgtacgtcctttgttggctagcggtggccggtcacatttagcggcggcctgtccgatgctagccttctccaagatttgtatgttggtgctgtcggtgcgcgggtggtggtataatttttttttcttggttatgatctcctagggcttgtaattttttcatgctctatcaagatgaatttcgcgttgtctggtgcgagttgttaaaaaaaaaaaagaagccacgagctcgccgccggcgaggtggtggtgacgtgggtgtacctttgggaggaggtggccggcgatctcgacgggctcggaggtctcccgggcgatgagcggcgagacgaggtggaagcgcatggcctccttgatgacctggttgaggtaggggaggccggcgtggagctcgtcggcgccggggacgcggccgcgcggcgcgaacccgtcgatctcccggaggagcctctcctccacgcgcgggtggcacgacaccaggtacaccaccgacgacaccgtgaacgccgtcgtcttcgtcccggcgatcaggtgctcgtacgccagcgcccggacgtgccggtcctccagcgcgaagccgccgtgcccgccgccgccgctctctctcgcgtcaagcagcgccgcgatgaagtccagcgccgccccgtcgccggcgtcgcggtcacgccgccggccggcgatgatggcgtcgatgcggcggcacaggcggcgctcgttctggtccatcttgtagtccgccgtgccggggacacggcggagcagccgcttgcacggcgtctggacgcacggcaggaagaggcccaggatggtggacagcgagctggacaggtccatcttgatgaactccatggacttcttgtactccctcaagaactccttcacgtcgtcgtcgtcgtcgccgtctccgtcgtcgccggcggcggtgtcggccgccttcctggacaggccgaactcgatgccgaacgccgtcttgccgatgatgtcgatggccatgcacagcgagagctggcagaaggggatgcagtcctggtccgggcacccggcgatgttgtccaccagagcgtccacgtacgactgcatcgtcgggatgagtccggcgagcctcgccggctggtacagcgggatcaccatgttcctcatcgacgaccacgtcgagtccctgacaccaccaaaaataccagcattgcaatacacacacatcaacacatttgtttttcagatttccgacaaagaaaccagcctttgccttctcagattctactggcatcttgggcacagataagcatagttttttttttcttttttcttttttttgaaacgattagcaccaaacagtgcgaagtttacctggtgaggaagagggcatcctggtgaagcgtgccgacgttgggaggcggggtgctgcggttgcggatgtccttgaacttcttgatgccgacctccttgcagagctcagcattggccacaatcaccagtggctgcctccccatgtgaaacctgcaagcacagtacagcctcctccatgagcaaccaactctcaagattggcattcagacataacatgaaattctgttctgctcccattattagcagtttagcatcattacctgaagatcggaccgtactccttcgtgatggcgcgaaagacgtccggcccgttcttggcgagaagatgaaggtggcctatggggaacctggttggaggccctggaactgtcctcaagctccagaaaggtgcatagaagtataccagaaacacagcaagcagagccagtgaagatccaagcagcaggacaggtaaacctggggttgcaacatggctgatttcaagtgcaatggagcaattgcttgcctccatggaagatgcttgcatgctcacaagtttgcaatggagagtttgctagctcgctggctgcttctggtgcctggattggtgctgctcatgccaatttaaacgtgaggcacgagtgattgtcctcttcatgctgctattcccaggacttgctgtagcagcggggagccgttccagagaggggcgatagagaacgtgtggtgacacgcgtcacacaccagcagttcttgacctgtgtaagaccagtgaaaaatcgagtaatttcattgtaagcaaagcgtttttgaattctaaaaaagtgctgaactttcatttacaaccaatcgttagcaatagcatttcaacagactgtctacagccaaaagtttacatacaatagcagatttcttatccctgatttaccaccttatctttgactataccaatatttgcttgatcaattggcctaactactatatacacacacaaacgcacacacactacttgcattacctacaagttttttaattgcaactatagttttgttaacaggagaaaatcaatttcatcaccagctgttattttataccttttataaccgaaaaacagggagaaattgtgcggacaaatagcaataatataaaacgagtgcagtagtcaaattgtgatttttttctacaaagtgcccactcatctatctgaacccgcatattgaattccacttaaacctgcagccatcataaatacgacagcacaaactgaaggaagcagaaacgtagggatcgttcttcgcatatccttttcggatggaattgggttctatggttcagccattggtttctttctcataattaaagcacatgtgcagtgacaacaaggatatctctgatggcaaccatgaaggcattggaatggggaatcaaatggataccagtacacccattttagcactgtaatttggtcaaaaaattttacactggctagtatcactgctttgcaatcttggccagtgtgacagtcaaaatggctgtcaatattgccgtgtgaaaagaataaactttgaaagtatctctcaagattcccagtgggatggaattgacaccaggattctgacaaggatggtattagcaccacgatacttggggggctaggatcttccacactttttgtggtgctatgctttatgcattataagctcaacaatgtgcatgtgtcactcgtaggtcagatcattttcttttctgctagtttgcatgttaactcactaatccaccatgccacatgttgtacacaagtaagtggaaaattattcgtgaatcatgaaagttttgaatatccaaccttaaccgtacctcgtgggattcgattagacatactgacgtcagttgaaaattatgccaaaaacagcaattttttcaataagagtcgtcgaaagcaccaggtcacatattttatcgtcaagttctcatttgttgcgaaatatatcacgcgttttaaaatatcacttcaaaattgataataattggtcgaacaaattgcaaatcagttcaattctatgggatcacataaagtccatacctttataagaaaaccaggtattggcagttaccatctggttactagcattcctcccttccccagttgattcctgatgatgtagtacagcagcagcatcagtattagtaggtgtttgggagattccacgatcccagttcccttcagcatggcctacaaaatgaaaaacaatggtccacattctctggatattggttgcagggttaacactgattctcctgttgccatctcccagaggaaatattctctcctcgatgtactcttttcttcaaggctgacagagccctgttcttttccagccatcatggggcccagctctgttcttttccaaactaagacgttgtgcttgtagtatacaaacatgttccatttccagctctgttccattttagatttataaggttattacaacagtgtaatgttttcttctcatctattcagtccacttagcaagttgttgataaatgctatctaactaaaactttggtttaagtttctctctcgatattttctgtttccatctattaaaaagatgaaggctcctctttagttctacaaaaatacatgtagtggtacggtaatatacatgtttaattactatgagctaatttgcgctgcaactcctccacttgattcatggtaatgccccagaattttgacattacagggctaagcacatttcggaccacgcagaaatatctagtccagaagtgtaaaagaagacatatgacaaagcacagagagataaatatatttcagagttcacttgctctggtctcctttaccaaaggtaaaagtcattaaatacctgaatcatgagaactcataaggtacccatgcatggatcaaatgggagaatgcttaacctattcagattctaatcttattttgaattgattttacctatcacaactagcactcatcaaatagccctctaatcaacaagaaatcagggaaaaaaaagagaggaaaagatgactgaagatatttcgtaggctgataggctctatcaagaacctaagatattcgtggacacccaccaaaaaggaagaaaaatactccagctgcacaatagtttccattaaaaatgagtgaatgatacacgggccaacaaaggtgaccgacaacctgtcactttttgaccctacgtgcaaatgcacgagactgagaacaaccatagttaaaccatagatccaatgcatagtgtaccatgaacaatctctcggttgtgtatcagttgtcatgacaagaaactgggtcccaaaactgaatcgaatgagtaatttatggattaaagtgactccacggagctatattaccatgccattgaagtaaaaagtaagtcaagtgaagtgactagatgtactgcagcaagccctatggcatgaagctttactatttttaacataatttggcatcgatgctgtggcattcaatctccagtatcagtttttgcattgcatgaagcaattgaaagaggataaaggcacacaacttttgttcaccagtttagagcccttcagtacaatattagggttgatggtaacaggaaaaggtcaatagtaaaagaacccaacttggacaattattgtaccaagtcaccagggagatgggggaatctccagctgttgacgttttgcacagcttgtaatatgtgcgcaaatttttaatttgtgcccctgaatttcacaactctctttttctgacaatgatgtgcataaacccctcattcctggacatgcaacctgatggctcagtgtttggcgatgaatgttggggaggctcttcctctgtaggctaaggtagtgggccagcggccgtatctcagtaggcagatagctaggtaagtatgtatgacttgatgtggaattttggataccaaggattgaggtgataatagctgaaagtgaaatgttctcaccatatcatgtgatgacaatcatctacttcaattcctttttcacaatcaattactccagcctatgcatttggaaggcaaaggagaagggcagaaggccaaaaatcatgcatcatggtgcgattgaaggtttcaaaactgtttagggtatgcttcaaacatagctgccgcataggaactttccagaaagcagtatacatctataaataatccaaaatcgccataaatacttcattcatgaggccagaggatatcatatcagaagttaggcaactcaggtggagatgaggaactgtggtatacagttacatatcaatgatttgttgtctacttcatctttgctggtgacttctaatcgaacctaggcctcgtgggtgaatagtacttctttggagcgtaaagtataaagaaaaggagagaggtcacgaatccaatctagatactgaagaatatacgagcactgaataggcaacaggttcataaccaatgacagcaaccgaaagctgtgccaccattggtgtatgtagaagagtattctcttggatagttggaagttgtcccaccattggctattccatacctttacatggaaggtgaacataaagtctcatatgccatgataaagttcttctgtagtctttgaatttgccttggcctaattattccttgctccttgtgtgtgacaggcactaatagacaagggtcacagggtacttctctaaggtcaaaatgctatcgagctagtccagcaaaaagttatgttatgctagtttgatactcctatgtggattcaaataattgatttggctacagtgctgatataatttttccagatttggtttgtgaaatgaattgaaaaaaatatgtgtggtacgtaagttcaagcatcaacctctttgtagaaggaagattagattaaataaagacagtcaactctccagtctcaacgatgttttcttaagaaatctaatacaactgggaggtgacaaggaagcatattgtcgtaatacataagcaatatgatactaaagcagctgcagtctgatcagaaaaaataaagatgattgctacgtagcacatacctcagttctccttttagcgagtagggaagctagccaaatcacaaatcttttgacaactctgctttggaatctaccatctcttattgatgaatagacaacttgctaccaaagtaccaagtcatttttccaaccaggttctggcattaatagtgctcgccattccttcttcccaattggctaaactaaaataaaatacatcagtcgctgaatcgtgtttcatagcattattggagtaactgatagcgtgatgatcaacaattcaacatggataattctcattttcttctggcagcacataatgagtcgtaatatttcgattttcagtagagaaaaagctacgttcggaaagaatcatttttctcggagactatgtgcgattacagatatcgttgtctgcatatactgtaggtgatttgtactattaccaactgatttgatttaaggacacacgaatgatatgcatattggcctatgtaataacaccgtttcttgggggccactgtctgctacactagctctcctctaggaatgctcatattatgcatattcatgtctccgatataggctagtccaagcaaaataattggcgaagcttccataaattaagggattctcaatgtaattgtgcatttttcttgcttacatatctcataaatcaattacttctcacgataattttggcatttcgcagacaacaaatctcacaagttttattaccactaataacaaaaccgcacagatttttagtctgaatggagcctccaatctcacacatgatgcgcaagaacatctataatcagatcctgcgaaacccaaagaaaaccatgcgataattagaagtaaaccacctgatgatttcgcgtggaagtggaaggatcggaggcgggcgcgcgagcgagcgaggcagaggggacggcgagccgcagctaccgcacgggcctcgagggatcgatccgcgccaccgccgcggccgcctctggcgaatgcgcccgcgcgaatgccgccgccgtcgccggaggtggcggcggcgggcggcggcggagggggagagagagagaagaaagggggaggggtaaaaccgtaaaaaccgtaggaaagcgagggtgaaagtgaaaagcgagaggaaggtgggggtggggcactgacaagtgggccccgtttgcagtgacacgccatctccttccggtagagggagcccgtctcgcctccgctccgattccggcggcggcgactccaccggcggcgaatcgccgccgccggccaccgccacgcgccgctcttggatcattcaatcacccccaagacaccattccaatccagttcagtgttagttcggaatagacatgaacagttcttggcttcttgatgatttgctcttagctgctgttctatgcaattgttcaatatttttttgtgtgtatgtgttttttttaatttttaatttgctgaggcacagaatttggaattgctccataaatgattggaggatttgttgtgacttttccacaatgtttcttctcatcttgattggttgccgtgcaccccaagcagcaaattccaacccttgcttagaattgatgtggtcaatccaggcttccagccgattggtggattatggtgttctttatatatcatgttttggatacactccacgttgatctagtctcatatgtcagtgaactaacattttttttgcaagttggtctgaagggaaagttcatggctactgctcttttgctgtatggtttacatccacatatttgatggactctcttccacactcaaatttaatttactaatttagtgatgtatatataggcagtaggcacatagcatacttgagcatgttctacttcttctagccattgatttgttccagagatttggagattgttcagtttttgtttggtttcttgtaaatttaagtagcacagagtggagatgcaggaaggaaggaaaggggtgccatctctgctctcatctcagggagaatgcattgcatccaacatcacacaggttatatatatgcttaagtttctcagttgcaaattttgctctttttgcaattagatttggtttaagtaaattctgtattcctgtctagcagctgattggttggacaccactgatagaattgaagaatattgctaagaaagatggcatagctgctcggctggttgggaagattgagccataccaacccctttcctctgtgaaggatcggagtgctctcaggtgattggtctaacctctctagatcatcttgatgtaccaagtttattcaagattattcaaggataatgtgaggttagaatttaaatagcaccaggccaacatgttgagttatgcagtttttagtgcaaacatattattcaaggaatggttatgcagtttttagtgcataacatattattcaaggattggttatgcagtttttcccccaaaaaaagagttttgcagtttttagttcaaacaagagtcatttcaatagaaattacttactacgaagaatttatcatagaaacgatagattggcaaatgtttcttgttactaccacatggtagggataaagttattcccctcaaatttaccaacttttgacagcaatatgaatgaaaatccatcaaattgctatcatgacaagtatgaatgctgacttgcagattgatcgaagatgcagaggagagaggcttaatctcacctggcatcacaacactagcaggggtcacaagcggcaatcttggtatcggagtggcgtttgttgctgctcagaaaggttacaaattcattgctgtcatgcctgctaaactctcgatagataaacaaatcctgttgagatacctgggagttgaagtgattttggttggtaagaagcttagctccatggccctcgtattacaggtcagatgtaacatgctagtctcctgcagaccctgcactgaatggattcaaggggctacttgatagagttgaacagctgaagaaggatatggagaatgtgtttgttatagatcaattcaccaatcctgctaatcctgatgcgcacttcagatggacaggtaacatagatttattatttctttcaaagtaaaattgatgtagcagcgctagaaatcttagtagtactatagtagcagtgttgagtagcattataatattcttgtaactagacaattagacttactcccattatctaaaaaaaagacaattagacatactgtaatcctgcaaattatgaattacaatatggaaaccacgcatgaagcttagattgttgaagttagttaaacagtgtcactcatacagtaaatgctttgatatgattaaattttgttgccttttgtacggtcatgcttccatgcaatcagccaactctttgagtcttgactactacttgcaggtaacatatttgacctgaaatatttactgaactaaaattttgttctcaggacctgaaatatggaaagatacagcaggcaaagtggatatatttgtagctgcatctggttcaggaggcacagtgacaggcgtagggaggtatctcaagatgaagaatccatccataaagctgatatgtgttgaaccagctgaaagtgcagtaatttcaggtaacataaatgaccactatattgatatttgctctcctctcagcaatgccacacaaactgaatgtaaaactgagcaagtgagcttgtgtattatcacttgtaggaggtgaaccagcattccataacatccaaggcataggtccaggatttatcccagaaatattggacagatcacaaatagatgagatagtaacagtgaccactcaagaagctatggacatggcaagaaggttggcaagggaagaaggattgctcgttggaatatcttcaggagccaacgcagctgccatcttgaaggcaagctctttcattttttttcagcaaacactacagtaatgatttattatagaaacatgattgtcaattacattgctcctctcaatttgtgtactgattgataggttgcagcaagggaggagaacaagggaaagatgatcgtgacgatgttctccagtggtggggagagatacctgaattcggagctatttgcgcaggtgaaggaggaatgcatcaacatcaacaaggcattctgctgacatgtgtaggggtgatcatgcagtgtaatcttcaaggcttcattcttggtggttgttctactctaatattgtaagaagcttctgtacattggtgttattactcttagattagaatcaattgtatggatgttcagatatgcaaaatgttacctgttccttgctgaatgctgagcctgtccgtggcctggtctggctataagcgaaatgtataattcacaatcgttagtcacgctcgtttggaaggtaagggaagataaaatcaatagtaacttcttcctctatgaaatgccagaattctcaccgaacttctgtgcatacatatagaaatattctatacagggacaacaaaactcacatttgttctttccatcttccaatatgctgttacccatcattttgggcagctgctacactggttcttgtagcctcgttcttttctgattaaagatactacctccgttttttaatagatgacgccgttgactttttctcacatgtttaactattcgtcttattcaaaaattttatgcaaatgtataagatataaatcacacttaaagtactatgagtgataaaacaactcataacaaaataaattataattacataattttttttaagacgaatggtcaaacatatgagaaaaagtcaacgttgtcatctattataaaacggaggtagtagattttatcttggtttccattagtacgtgtttcaaacttctaaatgacgcatttcgtatggaaacttgatatatagaagttgccttaaaatatcaaataaatacactcttttaagtttgtaataattaaaactcaattaattatgcactaatagctttcttatttttccgtgccctaacttcattttcatctttagtagaaacgaacatcacgtgcaacttgacgtacagtaaagattcagttatcatttagtaaactgtctcactacagagttaaattctgaccaaagacacacgttccagtcatataaaattttccgaagtagttggcacagagatagaactataactttataagcagaaataagaaggttccaagtcagtgagaaaggcatcaccgaaagtgcagggcagccctattcatacatggcctcctatgaatacagaattcccgggaccaactgcagaaaaacaactatttgtgcaaaaaaataagaactggactcttcagctggaaggctcacctgtcaattaactatgacaaaaggaattctcagttctcactgcctaacaacactatagagtatagctaaacaccctgtattcaatcatgcattcctcatctcttggcaagagatttccagcaaataaaaggattcatcgaagatggccaacaaacggtacgcaagcttcttcctgttctttatgatgccattttctctcctgcacaaatcgtacccgcagttggtgaatcaatctagtgatgaacaccaaatcctccttgagatcaagagacactgggggagctcacctgttttaggtagatggagctccaattctgctgctcactgcaattggggaggaatcacatgcacagatggtgtggtgactggcatctctctaccaaatcaaaccttcatcaaaccaattcctccctccatttgcctcctcaagaacctcacccacttggatgtctcctacaacaacatatcctctccattccctacaatgctctacaattgctccaatctcaagtaccttgacctttcgaacaacgcctttgctgggaagctcccaaatgatataaatagtctaccagcgctgctcgagcatctcaacctttcatctaatcacttcactggcagaattccaccatcaattggactgttcccaaggctgaagtcgctgctccttgacaccaatcagtttgatgggaggtacccagctgaggatatcagcaatcttgctgaccttgagaggctgacactagcagtcaatccatttgtcccggctccctttccaatggagtttggtaggttgacacgtctgacttacttgtggctgtcaaatatgaatattaccggtgaaatccctgaaagcctatccagcctcagagagctcaacgtcttggacttatcatcgaacaagatccaaggaaaaattccaaggtggatctggcaacataagaaacttcagattctgtacctgtatgcaaacagattcaccggtgagattgaatccaacatcacagccttgaacttggtggagattgatgtttctgcaaatgagttaacaggaacaataccagatggatttggtaagatgaccaaccttaccttattgtttctctactttaacaagctgagtggatcaataccaccaagcgttgggctgctgccaaagcttactgacattcggttattcaataacatgctctctggatcgctcccatcagagcttggtaagcactcaccactggccaatcttgaggtctccaataataacctctctggggagctaccagaaggcctctgcttcaacaggaagctatatagcattgttgtgttcaataacagcttttctggaaaacttccatcttcattggatggttgctatccgttgcaaaatttgatgttgtacaataataatttttctggagagttccccaggagcctttggtcagtggtgacagatcagctaagtgtagttatgatacagaacaacaatttctctggcacattccccaaacagctcccatggaacttcacacgtcttgacatcagcaacaacagattctcaggtcccattccaacattggcaggcaaaatgaaagtattcagagcagcaaacaacttgctctctggtgaaattccctgggatctgacaggcatttcacaagtcagattggttgatctttctgggaatcaaattagtggctcactacccacgacaattggagtgctgatgaggctaaacacactttacctaagtggaaatcagatatctggtaatatcccagcagggtttgggtttattacagggctgaacgacctagacctctcatcgaataagctatctggtgagatcccgaaggattctaataagctgctgctcagttttctgaatctctctatgaaccaactcactggggaaattccgacatcattgcaaaacaaagcatatgagcagagcttcctattcaacctaggcctctgtgtctcatcgagcaattcactccaaaatttccctatctgcagggcaagagcaaacatcaacaaggatctgttcggaaagcatatagccctcatttctgctgttgccagcattatactcttggtttcggcagtggctggtttcatgctcttaagaaggaaaaagcatctacaagatcacttgtcatggaagttaacacccttccacgtattgcatttcaccgcaaatgacattctttctgggctctgcgagcagaattggattggaagtggcaggtctggcaaggtgtaccgggtttatgctggagatagaacaagtggtggcaggatgatggctgtcaaaaagatatggaacatgcaaaatattgataacaagctggagaaggacttccttgcagaggttcagatattgggagagatcaggcacacaaacattgtcaagcttctatgctgcatctcaagttcagaggcaaagcttctgatctacgagtacatggaaaacggcagcctacatcaatggcttcaccagagggaaagaattggtgtgccaggacctctggattggccaacaagattgcaaattgccatcgactcagcgagaggcctttgctacatgcatcaccattgctcgcctcccatagtgcatcgagatgtcaagtgtgccaacatccttctggatcacaacttcagagcaaagatggcagattttgggcttgcaaagattcttctcaaagctggagacgacgagtcattttctgctatagctggaacttttggctacatggcaccaggtgatagctgaaaagaacaactttgatgagtatatacttgcatattacctgaaacactaaattgtttacactttgcagaatatggacatcggctcaaggtaaacgagaagatcgatgtctacagctttggtgtggtccttctggaaatcataactggtcgagtggcaaatgatggtggagagtactattgcttggcacaatgggcatggaggcagtaccaagaatatggtttgtcagttgatcttctcgatgagggaatcagagacccaacccatgttgaggacgcattggaggtgtttacacttgctgtgatttgtactggggagcatccttcaatgcggccatcaatgaaagacgtactgaatattcttatccaatttgaccgtaaatctacaaggattcagggtagcttgaaacatgctgtctctgatgaaacaacacttcttgaatcctagctaagcagcacttaatgagaatatatggttcctggtgtaggtgattattcttttcatttgcaacaactagatgatgcttattacaggccagtgattactactgtttaacttttatgttgacatgataaagaatatgaagtgtgcaatcactaaattttgtttaacttgcgaactaaatgccattacataaagttatcttcagattattacaaacactccattttccaaagcagaggtgcacagatcgctaaaaaaggacggtgcactgcgactgggagatagtaatatggaactgtatatgaatgtttgcgcatgtttgacgacgaaatttcttgaattcatttggtcagcatgcacacgatgttaattatatatgacaatttggattaacaaaaaaaggtaatgcagaaactcccttattatgtggagacaaattggaccttatcatctctagaaaaaaaacgaaaatgtaatggccataggttactccaagcaagttacaattattgagaacttcttgtttttcttagaggagacgaaactaacagtttttataggaaaaaaaagggtatctgaattgattccaacaatttacatgcatgaagggagtaaagcatttgctcttggtaccttcaaaaggcagattttatttttaacccaggaaaagggtgtattattcaggctaatcgaaatcaaaaaccccaaacaatttggcatacctactaacggatttgatccaacatggaaacacaaacgcgcggagattacatgtataagggccagcggcggcgggcttactcggtggttccgcacggaggcgcgaagacggcggctgcgccgccgccaccgccgccgccgacgccggcggccgccgcgatgggggcggctcgcggtggatgcaggaaggtttgcggttggcatgagcggatgacatgtggacccacctgtcagcagctcgtctttctgctcctcgtccatgaggcgctcgtttcatcacggtaaaaaagagagaagaaattatgggttggatgtaaaaaaaataaatcgcatcgatgataaaaaaaacttactagttgtgtgatctagtacacggacttaagaatagaacgtttgagtgtaattaaatagcttgacgagcgggtatatctttatctattataaaagttttagatgtttttaccgaaattttcctacgtcactcctaattgtttcggtttagtatatcatacgtactcacgcgagcaaacatccatccatcgttgtgcggttcagatcgatcacgccggcgcgaagaagtccagaaattgttttggagtacgatggcgggtgaggcagccaccgtgcttctcggagagattgtgtccaattcagaacacaaatccaacaaatatggaataatatatcttctctgctattataaaaattgatggtgtttttttcggtactttggtacgttatccgtgtatgagtcggattttgagttcattcgcttttggaaatacatatccgtatttgattcggtttttaagtttcttcgcttttggaaatacggagaaggagtcgtataagaaatctctttaagaagctcgcatgctaacttgagacgaacagactcctaactataactcatgattttttatatatccaagtaaatttccactatgaatttcaccttaactaaaccatatctctatctctactacttaaaaagaagtgtttccatcgtccgtccgcgaaaaaaaatcgagtgaaaaaaaaaatcaaatccgattatatgtgccgcggtaaaaaaaacaaatcgaatccgattccgtccgtgaaaaagggtgaaaagtcgggcgaaaaaaaaagtctgattcaatttgcttccgtcgtccattaaaattttcgaccgtaacatcaattttttatccgtaaatccgattgaaatccaataggacaatccaaagaaagagaaaaggaacgggaaaaataataaaaaaacacaaattttatctcaacccgcgggaagctgccgccgtcgctcgccgctgcttgcagctgccaacgccatcagatcctcccgggaaaaccgatgccgtcactggcagtttatgtctagaactatctcatataactctcatgaaactataaaataactataatcattatcattagtttttttcccgttgcaacgcacatgcatctttctaaaagcttgataatttagtattttggtgcaacaaatttgttaagtgttgtttttttttattaatgagtgttaggtgagctttttttttcacgatatcaatattgcatcatatagcaccaccggttaatcttaatctttaagaattacgttacatccaatttgcaccgccggttaggattttgttttcttcaccatctcaaatctcaaccaaaatataatatattttttgacatagtaaagttaattgacgttaagtagatactttaaatatgcttacatagatttgcaccagtatattgacaaaatgagtacttaaaaattgaataaaatgcttgaaataattaagttgtcacatcactttttttaagttattgtactaaaactgtacccacaagtttttacactcattcgttcatttctcaagttttttaaagcatgtcacgaataatttgtgtataatgatcaacaataatctaaaaataacgggccttaaatatcttccgaagaatataaatttaacatattccattatggatttgatataaactagtgttgcactagttagtacagttgttatgtttccttcctgcaaaagaaatagcatttggtaaaaatatcatgactagacaaaagaaatagcatttggtaaaaacatcataactagacacagcatgactaaaggcaaaaacttaatgagcgggaaaccctgatgtttgtataaggttgtttcaatataaatactgaaagattgaggcaagtcttatcattggaatagttcacattttcacattagggctatatacatattttgtttgttttcaaatggttatccatgactagcccgaatcatgagatcttggaggaaaacagtaatattgggtcaagaagctgaagagcctctatcattctgtccttttaagtcaacaatatttacgataatagtagattttataggagtcctgagaatagtgtgacgcttgcattcaacctgatgttcgcggtagtgaacggacgtcgcgctcggggtggtatgcaagtgttctcttcttcggttgtggtttggaaacgagaggttgtgtgggcgttgttatgatccggagggtgtgattaccatggcttgcccgcctaccgccgccaagggaacggcaattcagtccacgcgtgaaagcaacgcaacgagctgtttaaataactcggtggcctccactcgaataactcgatcgcttcctggtccactgtataagcgcagacctcttattgagggaggagggagtgacgtcacgtggtgcacgtagacgtcgactcagataatggacatccggaaaattacaacaaactgatggttgggattgaaatgatgtatcgtaaaggaatacaacaagaaattgatggtttcgtatgtggtttagattaaaacctgctagccaccaaagcttcttctcctcctcgtgatatggttattctcttgcactataactctgctcctaaaaaattttaaaatatgaaaaggcacaatctcaatctccttaaaactcatctcagtgaaactcaaactcaacgagaatgttactcgcagctactcgaaactagtgactactaatcctaaagcccttaaatgagtgattaatgaactaatgatcatttgccagcggcatagtgaactaattatcattcgacataataagactttgtttctttattgaaggagatgaaactgaaaaataataaaaaaaaagtacatatcttaattgattccaacagtttacaatatataggagggaacttaaaaagtcctggatatacatctaccctataattcaccaactcgttttactcatctttcatccttacactcttacattcatcacttaatggttcagatcatccctggaatatcttgctcagatccaacgtttgaggtcgctcccacctcccacctcgcattgcaccggcaggcaatcccgtctcccgtcttccgcgcgatcctcttctcccttccttccgaaacctctcccgtctcccgcacccctctccaatccgtcctacctccccctcacatttcctccccgcccaggtcgccgacgcgccgccctcagaagccgcctccagatcgccgtccagcctcctcgccctcgtgccgcaagcatcaaccgtctcgccacaaacagcctcctccaggataagcacgacgactaccatataccccccatataatgctaaggtctgccaaaaaaaatgcatctttttgccccccatcagttggatccttgtcaccgctgattataaccccgccttgtctgctcccattgcgatgcatgtttctcaaggcaaggaagtatgatcatgataaagcaatgcaaatggggcatagatgctgagatggaaaggaaagagtttggagctgacactgtcttggaggtgattagagattcagagagcattttagttgttaagttacagcgtctaattaatttttggtttttcctggattcactattgggttcttgtggtcaggagtttgagttcgatggtgatgactgggaaggctggacggtgtacatcgagaaggctggcaaggtcgatccgaacaagctgatgcatatcacctcagtatagcggtgcatcaagtaccatgtgcagagtttgaaagaaatttcagggacaaggtccctgcttgcacattggcagccaagaggcatattgatttcagtatttcacaacatactgaaattctcagatactgcaaaggtgatcaccatatatacatatgtgaaaagaaacttttgaaaaaagaaaaaataaatcctttattaatatattatgatgcacattttgatcaatttatacttctaactttgttatatttaggatatttttaaaaaatatttaagttagaccacccaaattgaaatcctaaatacaccacttgctgtgtatagtgttgtatggtgactgcaagtgccatgatttgtcatcgaagaagattagctctgctcggataagctgatagccactacaacgataatactcagcaatatatgcttgggattgttgtagctgcagccgtagccatcatagtcgagcagggcagccaatcacatcttaattctgagttcaaattagaactaattaaaacagttaatttgtttaggttcttgattgccagagtacacttcttgaagtaattaacaaaatgttagcatcaactagctgtgcctatcaacctttgtcaaactattagctgtctgtatttatacagctatatctgttcagcttaccaatttttagaaatgttcttaccttcatagcacctattgagtccagatgaaggccatgtataggtacttttagtatcctgatttcaatttgtagtccctttgaaatagttcaattcagatcttctgaaataggacattgtgtccaacctaacttaaagctgattgttgcttagtttccttagatagttctaaatgtccattatgaaggttcaaaagcaacacacctagctactttaattttgtgactatttttagagtttggtgattttcagaactgaagggcaccatagaatatgctcaataaataaatgtttaagaggcaatggctatcgcctaagggagtgtttgaggagaaggggattgaggagattgggaagatacgcaaaacgaggtgagccattagctcataattaattgagtattaactattttaaattccaaaaatggattagtatgattttttaaagcaactttcctattgaatttttttgcaaaaaacgcaccgtttagtagtttgaaaagcgtgcgcgcggaaaacgagagccaatctcccctatcacccctaaacgaacgatgcctaacacaagttcttctttcacatatttatataacatactccctccgtcccaaaataagtgcagttttgcactattcacattcaacgtttgaccgtccgtcttatttaaaaattttttatgattagtatttttattgctattagatgataaaacatgaatagtactttatgtgtgactaaatgtttttaattttttcacaaatttttcaaataagacggacggtcaaacgttgaacgtgaatagtgcaaaactgcacttattttgggatggaggtagtattctataatgcccttgtttggggcaacctggagctaagtccctttttttaaaaaaaggaacctggagctttggttgatgaataatgagttttgcaggttctgttctgtgcagcacaatagcagataacgatttaatttcaaccttttcagttgtagctgcccgaatgaaaaatgcctgaacatgcctgaagatgagtagatcttttgcaagtcttgatttgtgcacctcatcagatggctgccagagcatgaaaaattcctgagtatgattaggctgtttgcaaatcttggatttgtgcccctcatactgtatgtgcacatctttagactttagacctgaagacattatcctcttgttgtaaactttgttatatataccaacatgtagtaaacatccattaattgattttataagattaagactaacaaaatgaaacacatttttgaaaaatgcccgaccatgaataagaactttaaaaatacaaactttcaattaaaatggagtgtgttaacatttaaaatatttttttaggagctacatgtcctaaggcatgacgtaaattatgttggatcatggcaattttcaagagttgcatgtcttttcagaccggaataataaacttgaacatattctggagcctacatctattatatgcgtaattgttgaaacacatgtttttcagtctgatttgtattaccaaaaaggagtaacattaaatatagtcgtagcgtagcacgtgcatattactagtaatacacagttagttagttaggttaattatctaattaagtaaatgattatgtgtgaaaaatactacctccgttttttaatagatgacgccgttgactttttctcacatatttgaccactcgtcttattcaaaaattttatgcaaatatataagatataaatcacacttaaagtactataaatgataaaacaactcataacaaaataaattataattacgtaaattttttgaataagacgaatggtcaaacatgtgagaaaaagtcaacggcgtcatctattaaaaaacggaggtagtaattgttacccgtgttggcggtttggtttggtttggtcctgcgggttgaacgggtttgaaccaaaccgtgaacaccctgagaccgtaccacccggaccgccggcagcggcgctcgcccccgccctctccaccgggatggacgccatccgccgccagacgctgagccctatccgatgatgcttgccccctgtctgctctgctctctctctctctctctgctcacgtgtggatagaacatgaaagactactggactgtgtttcgctggatggtgctggtggttcgactgagggacgatgggttattgtgtgctgctgctatgtatctttttttcttttcttgattagagatcgggtttgcatcgcccaccgatttgtcaacatctgcatttctcccgatatcggcatcgcatccagcttcctctttgtcgttctgccccttgcatttttggcctgatcacccgttcaagctctcggctacaacgactttttcgaccgatgatcttcaagcacgtctactacgccatcgagctttgggctgctactacgtcgcaccctactactattgtagtgccgctgcctgtagtccacatctactggttgttgtagcgctgagaggggcgccctcctcagcatggcctcattaccggtggacttctggccgttgcatcgatatgaggctgcagctatgtcgtctcttcggaccatagcctcgttgctttcatcatcttcatcgccgctcgcacatcgacacccttgtcatccgcactgatcatcttcagccatcgggtaattcttcgtctacttcaagcatcgccaccgcgtctccaagttgccatcatcgctgctctaggccggtggtccaattacccctacatggctatcggcgtcgtcgtccaggccgttggttcagctacttcgtcttcgtcttcgtgcaacatgcctcatcgccaacgtcgccgtatcttcctcgactacacttcgttcttctctggcaaatgcatgctgctccggcaattctatccctctacgctcttctcgtgccggaggctttctctgctagtctccaggtacataatcatcaagtattaatcgtagtttaatttatgcatcaattttactgtgtcttgcgctacaacttcagcaccctccgggtcttttgttgtcttggatttctaattaatgatttggagtgtacgtttcttgatccatgcagtgaactcatgagcattgcacaggatggccgaccagaacttcctctattggaagaagcctctgttgccgaaattgcatattgtaaacaaaaatgtgttttcattgcacagatcgctgcactgtttggttttttactactcacagtgctcttctgctgctgtaatagcaagagattgtggaatagcacctactagccaccagatcagaagtcccaaatcttttgagtacatataatcttttgagtcccaaacccaaatcaggaggaggtttggcttgaacagagtacgtatttgaacattcggttggaaaaataataggtttatgtggatctacagtttaactaattgtttatcagctcttgtaatctttgagactgtacattcaaaagtagaatgtatattgataaagtgtgtcacttaattattatcatatatataatggtaattgatggtaatgctctttttcaaaattctgttgtaacatatgggcaatatgtttgttttttttctgaaaaaaaacatattcttcccgcataaattctaattgaaatttcaaaaatattcttggacaaatattgtagtgtataaatgcttatattcctggataaaatttaaaattttcaaatccttatattattagatggaggaagtaatgttggtagtcggctcagtttgaacctactgaagattaagattaagtacaaacacgtgaaacaaggaagccattaacatatgattaattgagttttaattattttaaacataaaaatagatttattatatattttaaagtaaattttgtatagaaaattatcacacgaaacgtaccgtttagcgggttgaaaacatgctaatgaaaatcaagataaaatatatacgttaatcaggtccaaacagggatcagtgctgaactgatgaagaagtacatattaatgctctgcttccttcctgctaccaaggttggcagaggaggggatcatgtcctagatgtgaaaatccagtatatatgcatgactacataaaaaactggatgagccacataatcgattgaatgttaaagtccagtatatatgtatgactacatcacaaaaactggatgagtcacattatcgatcgaatgttaagacaaatcaataatgtttcgatataaatatcaaagctagtgctatgggagaaacttcatacgattcttttgaaatttctaatgtattttttaaggtgaatcaattatgagatgttggagcaaaacaagatagaactgtagcatataaaaggtgaatcaattatgagatgttggagcaagacaagataaaactgtagcatatagaaaagagggttagaaacgaagatagagaccagggattatatggtatgttaataaataagtagaaaatatatgaggaaatttataatatgatagagaaaatgaccatgcgttgcaacggttaaaaatggttttggtggaaaggtcattccttacttcctttttcgccccaacctagtccgatatttccctatgctcggagtgtctcttcttggctcaacgtaccattgaagctgcagactctgctcaacctatcgaaaacattcccgtggccaagtcagagccgatcctccccatccattccatctatactcggagtgtctcttcttggctcaacgtaccagtgaagctgcagactcggctcaacctatcgaaaacattcccgtggccaagtcggagccgatcctccccatccattccagttcaatatttgttgatctcccaaaattggttgagggattgtgattactccatattcctctttatgttttttatcaaaatcatatcgaatatgcaaaactcatgataaaaacaaatactattaaatggaaattaaatccgatgaattaaagttgaattgaaactggcaacagatgggatgattgcacaagagcttaatctggccctggatggcggctagcattcttctttcgtaatcattttatttgatgtgatctaacgggaatgatcccagccgtgctcccaaaagactgttaccttagtaatacacaaaaaatactatggatacttttttattgtaaaaagaaaattgagatttgcaacagatttgcaacaggatagtgtgtacgatcgtgcgaaatttcatctcaaaacacgtaatgataaccaaaaaaaaatctatctaaaaatacacctacatatttttaggtgaaaatatattaaatgtcattatagtataaatttggtgtaattacatagagtgaagtacatgggcggcctctaaatttgtgcgggtgtatcgtctagattcctaaactcccaaaatacatttttgggtccctgaacttgtcatgagtgtcatataggtctaaataggttctaacccgctccatgcgctgacgtggcattgccacggtgacgtctgcgtgtgagtggaatccacatgtcaagcatatataaaaaaaataaaaaactacattttctcctcttaggtagtcatgaaaaaaatgataaaaattctaaggtagagaggagaaaatatgttatttttaattttattttttctatgtgactgaaacatggatccggctaacacgtaggtactaccatggcatgctacatcagcgcatgaagcaggttggagctcatttgcacctatatgacacgcaagacaagttcaggacccgaaaatgtatttcgaaagtttagagacctaagtgatacacccgcgcgagttaaggaatcgctcgtgcacttcacttatgtgtaagttggatgttagttaataataaaaataggtactccttccatctatttttgatagtcatatttcatcttggcacacagatcaaggatatttaaacatgctactagttattcttcgtaaacaagcgatacattaatatttacatttctcgatgcctatgtagccaatcttgtgtggaggaatgaagagtcacgcattaaatccgagaaagtcattaaaatgatatgttgttgaattgaaatatgcctatcaaaaataaaattttcagatttggaaatatgcatataagtatatgagggaatagttgcttagttggtatgtgcgaattgcgatggcttgtacggcatagttcacgggttcgattcccctgtctccccgctgctacttgtgttttttttttcctcgtatagcacggatcttgaggctaattgatgttccaaaaatcatcatattttttttccaaacaatctatcaccaattatttagcaactccggaaaagaaacaaaaatcatgcatgaacaatgttgaaaagaactactccctccaacccatccaacaatataagcatttcaattttgtcgaagaatataaagcattcctacactactatttgtcgcatcaatcacctctcatttaaaatcctgtcatcttatccccgattagctccccacccccattgatccctaattaaataaggggccctaaagttttttttttaccttagccttaattcttgctaaacaacataacaatgtttatattgttgaatggacgcagtaaagtaccaatgcaaacaaaattctgcctcttcttttttttttttatcttttttacaatgtatatttaagttaacacatctctctctctctctctcccccctaaacagaaagcaatcatttgataacactgttgtgcattggagcacgatagcactagaattgttctcataatataataaaaacaagcaggttatataatttatcaacaatgcaaaatggggtcttagcaaacaccccataaaatttagaagaaagaaaaagtaaatggacttgattccctgaatgatgcctcgaatggtgttacaggaatgacctgatttaataaaggaaccatgttttccttttacttcagccttgtaattctctttattttcttaataaatttagccttgaccggtccggtggaaaaaaaaaagaggaatagattgctaactgaggttgacagatagatgcaaacacgactaatccacaagcgacaatatagcaaggtcacctttggtaatatatctccatggtagaagttagcagacaaataagttttaataattcaagatgcaaaaagtagcaacagccaattgaacattatctcagcaggatgccaaagcggttaccatatgaacttcatataagtggactgacagttaggacataggttactccaagcaactaatgtcggttcaattttaccccaccccacaatctttaatcaaacagagaagatttacaccacgacccataatattcaacaagacagtaacttgaactaggtagcactttgttttgtatgaagcagtataaattacctgaaattttctcaaagacgtgtagtttacacaggcaagtgtaaaaatccctgttcatgtctaaactgttccaaagcagaagtggtaaattctccctcgcccaaaggtcataatggttccattgttccaagtcatccatgtcatcagacactaacgatgcgttggagctgggaggaccacataaacaaaggcattaacagcaaggcttccatgttagctcaaaatcaaatagtcgaatggatgacttgccagtatatgcccaattctaaaaggaattcacagtgactggtgacaatacaatagcatccacttgcattggagattatagctaaacacccaaaacacccatgcattcctcctctcctggcaagagatttccagccaaaaggattcagcagagatggccaacaaacggtatgtgaacttcttcctgttctttgtgatatcattttctctgctgcacaaatcctacccaaagtccacaaatcaatctaatgaagaacaccaaatcctccttgagctcaagaaccattgggggagctcacctgcgctaggtagatggaactccactactactgctcactgcaactgggaaggaattacatgcacaaatggtgcggtgattggcatctctctaccaaatcaaaccttcatcaaaccaattcctccctccatttgtctcctaaagaacctcacccgcttggacctttcctacaacaatttctccacttcattccctaccatgctctacaattgctccaatctcaagttcctagatctttccaacaacgcatttgatggacaactcccaagtgacttaaatcatctatcagcactgctcgagcatctcaacctatcatctaatcacttcacaggcagaattccaccatcaattggactgttcccaaggctgaagtcactgctccttgacaccaatcagtttgatgggaggtacccagctgaggatatcagcaatcttgctgaccttgagaggctgacactagcagtcaatccatttgtaccggctccctttccagtggagtttggtaggttgacacgtctgacttacttgtggctgtcaaatatgaatattaccggtgaaatccctgaaaacttgtccagcctcagagagctcaacctcttggatttttcatcaaacaagctgcaaggaaaaattccaacgtggatctggcaacataagaaacttcagaatttgtacctgtatgcaaacggattcaccggtgagattgaacccaatgtcagtgccttgaacttggtggagattgatgtttcttcaaacgaattaataggaaccataccaaatggatttggtaagcttaccaaccttaccttactgtttctctactttaacaagctgagtggatcaataccaccaagcgttgggctgctgccaaagcttactgacattcggttattcggtaacatgctctctggatcactcccaccagagcttggtaagcactcaccactggccaatcttgaggtctccaataataacctctctgggaagctaccagaaggcctctgcttcaacaggaagctatatgacattgttgtgttcaataacagcttttctggaaaacttccatcgtcattggacggctgctatctgttgaacaatttgatgatgtacaacaacaatttttctggagagttccccaagagtctttggtcagtggtgacaaatcagctaagtacagttatgatacaaaacaacaggttctctggcacattccccaaacagctcccatggaactttacacgtcttgacatcagcaacaacaaattctcaggtcctattccaacattggcaggaaaaatgaaagtattcatagcagcaaacaacttgctgtctggtgaaattccctgggatctgacaggcatttctcaggtcacagaagttgacctctctaggaatcaaattagtggctcactacccatgacaattggagtgctggcgaggctaaacacacttaacctaagtggaaatcagatatctggtaatatcccagcggcgtttgggtttatgacagtactaaccatccttgatctctcgtcgaataaattatcaggtgaaatcccaaaggattttaataagctgaggctcaattttctgaatctctctatgaaccaactcatcggggaaattccgatatcactgcaaaacgaagcatatgaacaaagctttctattcaacccaggcctctgtgtatcatcaaacaattcagttcataatttccctatctgcagggcaagaacaaacggcaatgatctatttaggaggcttatagccctcttttctgctgttgccagcatcatgcttttgggttcagcagtgcttggtatcatgctcttaaggagaaaaaagcttcaagaccacttgtcatggaagctaacaccattccacatattgcatttcaccacaactaacattctttctgggctctacgagcagaattggattggaagtggcaggtctggcaaggtgtaccgggtttatgctggggatagagcaagtggtggaaggatggtggccgtcaaaaagatatggaacacaccgaatcttgatgacaaactggagaaggacttccttgcagaggctcagatattgggagagatcaggcacacaaacattgtcaagctgctctgctgcatctcaagttcagatgcaaagcttcttgtctatgagtacatggaaaacggcagcctacatcaatggcttcaccagagggaaagaattggtgcgccaggacctctggattggccaacaagattgcaaattgccatcgactcagcgagaggtctttgctacatgcatcaccattgctcgcctcccatagtgcatcgagatgtcaagtgtgccaacatccttctggatcacaacttcagagcaaagatggcagattttgggcttgcaaagattcttctcaaagctggagacgacgagtcattttctgctatagctggaacttttggctacatggcaccaggtcagagagaaaaagagtaactttgatgagtatatacttgcatattacctgaaacactaaattgtttacactttgcagaatacggacatcggctcaaggtaaacgagaagatcgatgtctacagctttggtgtggtccttctggaaatcataactggtcgagtggcaaatgatggtggagagtactattgcttggcacaatgggcatggaggcagtaccaagaatatggtttgtcagttgatcttctcgatgaggggatcagagacccaacccatgttgaggacgcattggaggtgtttacacttgctgtgatttgtactggggagcatccttcaatgcggccatcaatgaaagatgtgctgcatgtgcttctccgatttgaccgtaaatccaatgggggaatcttgcaagatgatatctgtgacgaaacagctcttcttgaatcatagataaagagatgaaataacagttttttggttgaagaagtgcgatgatcatgacaatgcatgtttcaaatgctgtaggtgattcgtctgcttcatccagcaatctaatgatgctgttgcaaaaggatagtaactgcagctgttttatgttgacataaagcatgtgaaatgttgatgcagtcactaactactgtttaacttgcaaactaaatggcagcacctgaagttatcttcagatcataacaaagactacatttttttcccagaataagcacacagatagcatggatgttggcatgttgccatagttgactatgaaatttcttgaattcttttggccagcatgtttaaattagcttcatattacaacgtgtgttaattgaaaaaataggtactgcagaaattcccttaatttctggagacaaacagggccccattacatcgacagaaacgaaaatataatgtgcataggttactccaagcatctaactagtgagccttcaataagtagatgcccttctttttcagaggagacgaaactcccggttatttaggaaaaagagagggtatctgaattgattctaacaatttacagtcacaaagaacaaaaaaatgtactactacactggagcccgaaatctaaaccaaaatattttggcatacctaccggtcgtactcgtgatttcatccaacatggaaacaaaagcgtggaggagttcacaggtagcttaccggcccgatggttccgcgcggattacagaacggaggagcgaggggggcgacgagaactcgccgatggaggagaccccggtgcggtgccggcgactgagtgcgccatgcgaatgccgccgccgccgccgcagaaaaaggcggaaatcgccgccaccggcgaccgcttgaaggaaggggggatcgggggttttggggcggaaggagcagaagcgcaaaacagctgacatgtgggcccacctgtcagccgctcgtcatgccgctggctctggctgcagcaacggctgtatcacatgtcagcgcaaatggatgggataatatctgatccaatctgttctaaatttgtccgaaacaagggtacgaggtttatagaaaaaattaatctatatctatatataatataactaatataaatattcgtattttttcggtcgtcacatctaatttcgtccgagttttcgtccataagcaatccgattaggttagcaatagcgatggaaaaaatttgcaaaaaaaaaaaaagaaaaaaaacggaggccaccaccgcccgcctccacgccgtccgggccgccgcccctcccgccggccgcagccgccttcatgccgccggatctggtggaggcgaggtccggccggccgcctccacgccgtccgactcgccgcctccatgtcgtccgccaccaccgccgccgcacctcccctcccccgatctagcggaggggagggcgtcgccggggggagaagtgggggagggcgcgccgccgccgccgcttgcgggggaaggccgccgctcgcggggggggggggggggaggggaggggaggggtgggaaatgtattctagggttaggttttgggtatttatttaggttaggatcaatatagaccgtccattcgatcggacggctccagctgctcccgcatcgggccgtcggtctattgggccaccgcattactgggccgccgaatggaccgcgtcattgcatgaggacgtaaaatgaacttcaacggagaaaagaaacagtcctgatacataagataggcgaaagggaggaaatataaacttttccatatacggcccaaacctaaaatggacgatttttattctttttctaattaaataattgttaaatgatttttgtattattaaaattaacaattaagctctcaaaatttaaataaaattctaaagagcgtaactaatcatggagaatttaataaaattaaatttaaccatgttattttatttctcacacttactttacttgtaaattaatttagttttacacctacctacttaaaatattaaatatttcaaaaaatttgtattttaattaattacatagtatagatttttcttaacttttcctcaattttctggtctatacacttcccgttgcaaacgcacgggcactttgctataatttcaaagagtataattaatattgcagaaaatttatatttcattaaattagaatttaatatgttttaattcaattttctcgttttttttctttcgcgatgcgagctaagcaggtatatttttatccatcttaattatcattagcgcaatgaataatttacttatcttgaaacattattatatacatgttaacggtgtactttatagaatttaactgttactcgtagcgaagcacgggcattttgctagtaaatataaaggacgcgactacacagctagtgataggtgtattgtctaaatcagccaccactcatatgagagactctatccacctatgcttcaaataaaaaattctcttaacctactcatccgatttacgatccaattacattgttgtgttcgtaacaattaaatctttataacaagatctcacgtgattatattttgatgaaaaaaataaattacttttataatatatatatatatatatatatatatatatatatatatatatatatatatatatatatatatatatatatatatatatatatatatatagaattaacttataacgaaaagaaagtaattttaatgcatgcatttttttcattggacatgactacacagctattggtagctggtttgtactccacctagtgtttcctttcaacttgaaaaatgcaatagtatatatcttttttttaatctctttaataatgtatactccctccgtttcacaatataagtcattctagcatttcctacattcataatgatgttgatgaatctagacatatatatctatataaattcattaatatcaatatgaatgtggaaaatgctagaatgacctacattatgtctagattcatcaacatcattatgaatgtggaaaatgctagaatgacctacattatgtctagattcatcaacatcattatgaatgtggaaaatgctagaatgacttacattgtgaaacggaggaagtatcttttaaaaaaggtagactgctgggcaaatgcccggtagtattcatttaaaaaaacttatatattttaaatcacatattacttctaatgtcgtgacaaagttacttccattttgttttaagttacttttataatatatgtaaattacttttagactttattgaatttactcttttatatgtctaaaaagtaatttaatcatagctaaaagtaacatatatatatatgataaaagtaacttacgtatataataaaagtaatttataaatataaatattttttcatcgtaatataatcatataagatcttgttgtgaaaatttgattgtaacgaacacaatggtgtaatcggattatacatcggataagtaatttgagagaaaactttatttaaagaggaaaaagacatacatgtctattgagaaataaggcacgcaatatgtcgatccttctcgttgcaccattagagtgtggccacacggatggacgacaggcatgatcggacagctgtgaggcgcgatacgataaggcgagaagcctctcagtttagattttacgaaatataaatgcagatgtggatagtgtggtacggattcaaatgcgaacgtgatatttttagaatccggtgaatttggattatccgatcggtcgtttgtaggaaaccactctatctatctgttgtatacaacatgactaggaccattgcatggcctaattcattaattagcccgagtcttgagtctcactatttcatctaacacttgcgtaaccgtgttattatattatgggcatcattatattatgggcatcatgtattcatgttgtttagcactagttcattgattattgtattggttctattactaacattagacaattttaatctgcttttagactgagtccacactgactccgggctatttttgacatctgaaacagtctactccacatatgcatccgcaccctctctggatctgcttaaaagtatggtttaggatatggcatgatcaatatccatcgaatccgctcaattttcatccctagtatcaaccacgagaaaaatggcattatgccactctcaaaaacgggtttcgcaaaaacgccactccacaaaagggttttattaaattgccagtctcaaaccttgcatgtttgctagaatactttctcaaatgaaaatacccttggctttgctcttccacagcttctctttccacaccagtctctgctcaccgacgatgataggggagcctaccttgttggtgacaaagtgatggcgtaggatggaggtaccgagcagcccaccacccacgttccatggcacaaccgctggcctcgttgtcattgagctcccaacgagggggaaggaggtgcagcctctcacctctgggtctactacggcctcctcgaaccccgatgcagcgccgtggcctccttgaggcctcggcggagtggctgaagtaggaagcggggatggtagcacaaagaaggaagggcccgaccggaggtggagcacagcgagtcgcacgactacagcaaggcacggcgagttgcacggctacggcaaaggtgcggggagagagacgagtgtgccatggctctgtcattcctccgtcgtcgctggagaggtagacgatgatggggagaggcgagcgcgcgggagctagatgggggagaggcaagtgcggcaagactttgccatccctccgtcttcactggcaacttggctagcgcactggtgttgggagataagatagggaagaaggcgtttttcttccaaaaagtattctaacgagcgcgtatggttggagagtgacaatttaataaaacgcatttgcaaaatgatatttttttcaaaacctacctttgacagtggcgtaatgttaattttctcatcaaccagtccatgactgatcatgaataacagactcatcctagatggctacattacagaaaaagattacaaagaaattgtgaattcgatgtaaagaaaatcacaagcaattcacgaactacatgtctgcaggtgcaggtgaagaataaacaaaagagcgacaaattaatttcatggagtacaggagtagatgttgttgtcatggaaaagtgcatcaatatatgcagtagttatgcatgactgcaggagggctcagtaggttgtttctgtggttcacacaaattcagcttaccgttcgtctatataagcggtgaaactatcatgttcaaattcagctacaccatgcttttatacatacacagatacacttgccaattcaacactccgaattcattgtctaatttgttccgctcagttatggtttggtatacctaaaaaatgtaattagtacttagtttgagtatgagatactggggcgaaacaagtagtcgtagcagctatgtatggcatctcttgataagcaattacatggcatctcctgataagcaattactaataaatcttggagaagttttattattgcttttctttccgtcggcacaaatcaattgtattctcataccttacaccggttgagagctagtttatgaatagccataaccgttcaactttttctatagtgaaattcatttcagccgttgcttcaaataagccatatccaattactttttctatagtgaaattcatttcaaccgttgcttcaaataagccatatccaattattatagaggttctaggataaacaactgcgaattacaaattctaacttgattaaaaacaagaaactatttggagtatcacctcaaatacaaagattttctatctagggttaattggatcataccatttcaaaatcatcctactaaaaaattggaaccacacaccaccattacaattttatagttatttaaaataatctttggactaaattgcccatgacttcatcccctcccttgtctctcccgttcatcttctctaccctcagttgctggcttgaattcctcctatgctgccttttccaccgtagcgacctcctcctccctaccccaattccttcccctcccatcacaggcgaaatccttggtttcttctgttgcggtggtagcttggcgtagaccatccatcccgctataaaccaacccaagatttggtagacttctatactactcgaatccccgtccaagtttaaatctacaagggttatggacaagacatatcttctatcattggggttatgtaacaccctgaaaattcgaccaacaaaatcaaaactctaaaattatgggccttcaaaaacttttaaaataaattgcatcatgccgattttattcgcctatttcattggattttgatttcggagttcatagattgcgaataaggaataattaattaggaataaaccctaaaattaaactggcaaaataaataattaaaatataatttaaaataaagattaggtgaggatagaaataaataaaatattgctgcgaccatatttgtatcaattaaatttaagtgcgatggaataagaattaactctaattaaattcaagtaaattatataaaataaatatgggtaatgttaatctagggtgaatcttttggctagagcaacacaaatattgagtaaacttgatttgtgcaaaagttagaatttatagggcaagatttaaatggaaaatagactaaattagggttaataaggatctagcactattcattgcctacaaggtgcttgatgtggtcctagcctagccggccccgagccccgcgccgccgacgccgtcgcgtcgccgtcgccgcgcgctgtcgccatcgctgcctgccgccgcgcgccgtcgccatcgccgctgccgcgccgcgtgccgtcccgtcgcatcgtcgcgtcgccacgccgccgtctcatcacgctgccgcgccgcgccgccgtcccgtcgcctcgcgccgcgcgctcgccgcctcgcgcctcgtgccccgcgccgcgtcgccgtcgcgtcgcctgtcgccgtcacgccgagccccgtgccaagccgtgttgagccccgcgccgcgccgcccgcccatcgcgacgccgctccgagccccgcgccgccacgttgccgcgtgtccccgtcgcctgcaccttgtcgcgcgtccgctcgtggccatcgcgctcgcaccgcccgtcccatcgctccgagccctgtgccgccgcgcgcgtcgcatcgccgctgccgcctgccgcgccgtgcgccgctcgcccgtcgtcgtcgccgtcgccgtcgcgtcgccattagggccggccacccctccccgcgccctataaatcccctccccggtcgccattccaccccacaccaccccacctcctcttcccccatttttccctctttcttctccaccgcgccgccgccttcgtgccgtcgcgccgccgccctcggtgccgctgcgccgcgtcgagtgccgcgccgtgcgtcgcccgccttgcgccgccgccgtcggtaagccgccggcccccctcgtcccgtcgccgtcgccgccccgggtaggcagtgagccgagagagagagagagggagcagaagaagctgggagggagagaggaaaaagaaaaaaaaggaaagaaagaagggagagaggaaaaagaaaaaaagaaagaaagaagggagagaaagagaaagaaggaagagagaaaaaaagatagaaaaagaaaaggaaaaaaataaatagaaaattagagaaagattgaggaggtttagaaaatttaaaataattagaatttaattatagattaattatagtcgtagaattgcaacatttaatataattatagattatttttggtaatctctataagtaatcaattcgcggtaggaatttagatttattaagagctaaataattatgtggaattcttaggaatgtacttataaaacacaaaatatcttaggttgagggatagtcctatttcgcgaataatgtagttgatatagaattcgcctctcgcgctcgcttttcgatttggtctttattggattttatttgaattctaatggaattcaaatcaattcttcgcacgtaattttagagcccgagggagttgcggatccgagcgaggatcaagacccgcaggactacgagcaaggcaagtcatcactattctttgaacatgttgatcccaattgcgaaattattttgtttacaaataagattgcatgcaatgatgaacatcctacttgtgattatgccatgccttgattattgtttacccttaaatccttgtaaccatgattacgtatgaatccctagtctattaggacaaatgcttagaaatgctactctagattcatgcatactcatatttatcgaatactatatgcttgggtaattacctttgggaaggtaattgagatgcggcatgtggagacatgagcgccacattgccatgatattgatgacatgatttgtgaaaggagaaataaactaaataactgttttagactggggcggatggaggatttgggtggtatctagaaaaggctagtaccgtccccggtcaattaaggaccgagccatgaagttaagcatgaaacgacccccgtacaaccacacttctcgtataggtagagacctagtggattagatagccgagcggaggcagtatccctgcatagatggttcacccctgagtgaggcaggtgcgctacggtgggacagccgttgaggtagggccgagaggcgtgccctacattggtgtcgccattggtaggactgccatgagtgtgtgagagagagaacttaacttgaaccataatttaatatgtgtgtgagacttttctttcctgggagcgccagaactcctctcactgctagaaacatggacgcctagagtgcatgaggatttaagttcatggagcgggtactgccaatgcgaggttatcgaaaagctttgccgtgacgcgtctcatgtgttggggcgaggctcatgtgttgggcagtcgcggagtgcgggtaaagtgtacatccactacagtgtgagtaaaccaaatctattcgaatagccgtgctcgcggttattgagcaccgggacatgtattacacttggctagactctaaattcttaacttgtatgggatgggatattgcatgatgatttttatgctgttggagccacttcctgagaggcgggaaggtggacgtcctcagaaaaccatgacgactcaatggcgggaagctatccttgggatcacaatgaatggtggacagaaccgttgttgtttaatgtgaacactggtactaaaaatttgatcagtctatgctaggtcttaggcttgtgaaaagaattacaaaacttgctttgcgcaaaagaaccatagccattccttgaataccctctatcatgtgcattgttgttgtggtggcttgctgagtacgattggtactcacccttgcaatatacaaacttaatcagaggctggagatgaagcttcggaggatccctatgcttactaccaggagggtgatgaaggcgatggcgctcagtaggtcttagttacggtcgttgcctgtggcaatggcgtgccgctgccttaactccgctgccttatctacttctgttttttgaatgtatttcggaccgctcggtcctatgatctaagactatgcctgtgggcttatgatgtaataattcgcactagactctcgtgtatgtgtacttggtatttcagctatgaattcgtgtgtaccagactacttgatccagggaaatggtactgtttacacgattgattcctgttataaaacgggggtccacaggttacgaaatatataaatacggtatattcacaaatacacgggaaggttactttagtcttaaggaattaggccaatgcgtaaagaaaccgactcccaatacggtatattctcaaatacacgggaaggttaccttagtcttaaggaattaggccaatgcataaagaaaccgactccccaaatagaaggtgttagagtcatatttggaggtgatgtggattctgtgatcttgtatgcaccaagacagtttgagatataaatataaggtcccctaggagtataggatcatggaatcatagcattgctaccagccatagcagaagcaatctggaagactcgaagccaactcactgattggtcttgtcggattgttctcgacaaaggtcaactcgataactcgatggttatgttgttttcttttgtaatctatgtggttttcttcataatcccatataaactggattagggctattaccttacgaggggtctgaactagtataatccttgtcttctgtatgcttgatgttatttcgtgtagatcctcgtactaacgtaccccaatatcctcagaatactctacgggtatcccccgtcgacgaaaacctaaatttggtggcagtggagtgcggacaatgcggtggcggcggtggcagcagagggtgcttcacgtgctgctccagcggggcgccgtgacggcgatggggatggggaaggggaaggggaggatttggggcagggttatgaggtaaagcactatgcgaatctggctgggttattgggtgaagggaagaatataaagaagaggccggctcataaaggaatgtgaggggataagtgaatttattgctataggtaatgttaacctaactcgtccgttatacctttttcatttaatctaccaccgtaccacgaggattgaggggattaatttcacacttattatgatatggaattagagaaaattcgattggtagcacatatttcatctcagcaccaaaaaaatagcaaatagaacttgcttctccgcctacaagcacaacttcattagagatttctggaatttaccactcctggctcccatcactttagctcgttacaaacaagaatctgaacactatagaccaaaacgccctcaagtcaactccaacatcttctttctcattcaggtcaccacctgccttttgcttcttcttagccaggtcaggtaaaaataggtagtgattttcagctttagtggattaaaatcaagtagatagggatgctgaccacccgcacagaaaagatgaagggttaatttgattcatgccattgcaaatatatctattcaaataaataccattacaattcgtctattcgtatccgtgccactcaaatttttataaaattggaaccatgccatcgccgtcacattttctatcttcttccccatctacacgtgggacccacacgtcaaatttatcttcttcctttcatcctaccattttcttcctttcccatctctccgtcacggcaagaagagtgggcaggacaggatgccagtcggcggcagcgtacggcgtggccctgcaaggtcactcagttaagcatcacgaataatgagttaatactttaacgattttgctatatctcactcgaaagattttttcttatctctcactcgattttcttactcaaatttacagtgcattttcttgtaagttacagtgtaatttatgaaacttacactgtaacttttgtaagttacactgtaatttttgaatcttcgcatgtaaattttaaattttatattggatttggtctttttattgaggatatggtaatttagtgtccattatggtgtttcttaattgctttttgctttttattttatctatcggattttaatctaaagattaaaaatctgtgtgatacgattataaaaatctttcgaaagatgtataggtactcccatactttaattacaagtatcactcgttcttctagctgaaaactcatttttgagatgatggacagtgtcactgcggaggtcacgaagaggtacacattagtgttctgtttcattcttcctgcaaacaaaaaggttgtattaaaggggatcatgaattagatgtgaaagtccttcaacacatatgcatgactgaatgaattggctgttgcccgaatgcaggagcaaccaatataaatataagatcatttctttcataagtagttcagagttttacagttttgcatacactctacacaacccttaaaacacatttcaactttctgatatgtttattgaatctagtttatacgtgccatttgactgtactgcatacgagatgttggagtaaaccaaccatacccatgcaataggagggtgagcaaataatgttgcgaatagaaataggagatacttgtagtaaataagttcaaatgtttatgttctaattaattctagttcgtaaaatagacggtggggtatatagttgtataaaagtgcaccatgtacttcagcagcacaatggttgcaaagaacatcaaattgtgcacactctttcgtagaataggaaccatcaactgtttgataaatccggtttggatgaggtattatgtactgtttaaataaacttgtcttagttcaaaaattgaatatctctttctattactatgtattacaacatgtccaatgtatcctgctctagtcggcattagtactcaattttttgttgtgaggccatacaacataatgcggtagtaagataggggcatcagtactcaatttggtgtggagccatgcaatataatgaggtagtaagatagtaagataggggcatcagtactcaatttggtagtaagataggtgcatcagtaccggaaatgctgttcggtgatcgatcactctggcccctccccctccctccctccacctggtttccttttttgacaccgcattactttcctattttagtaaatttatacacctaaagtttatacacctcaagtttacacatctaaagtttagagaccaaaagtttataagtcaaaagtttatatatccgattcaaatttgaatttgaatttaaatatttttttatatatagtatttctatacatgtaaagtttatacacctaaagtttatagacctaaagtttataagtcaaaagtttatatacccgtttcaaatttgaatttgaataatatctgattcaaatttgaatttgaattcaaatattttctatatataatatttctatacatctaaagtttatacacctaaagtttatagatccaaagtttattagtcaaaagttgacatacccgattcaaatttgaatttaaattatatctgattcaaatttgaatttgaattcaaatattttatatatatagtatttctatacatctaaagtttatagacccaaagtttataattaagtcaaaagtttacatacccgattcaaatttaaatttgaattcaaattttttatatatatagtatttctatacataattttttctaacttttgtttttttaaaaaatttgtgtagtgtactgtagtagaaagagaagaaggagaggaggaagggggaagagggaggagtatccatcagtactcaatttggtatggagccatgcaacataatgaggtagtaagatagggagtccacaatgtattttgtctgccacgttgagtaaggtggatgctcattgaaaaaactattttgttactatacaacgcaatccctaatcccataaggctattatacatctattattctttatttgcttgctaccagtagtatcagtaaaacatgtagtttttccctaacccttttagatttattgcatattgttgtggttgcccttttaggtttattgatttgtgtatctttactcccgagctacctacctatgcttgtacatgctaggcacccgtagccgagatgatgaatccatgaattcacatagatgttcgccagcaccatcaactaccactatggcaaccacatccatgccgtcgctagtgcatatatgatgatcatttctataagcaaaaagtccaaattatcctcctaaaattattgcgacggtacgaaataccctcccgattcaaatacaagtcattttacaccctgaactcttaaaactgaacgaattactcccctaactttaacgtgaagtggttttgatctcacatggcttacacgtggcagccaagttaaccaagaattgttttaaaatcgatgagacccaccttgtgaagctaaacacaacggagacatccatgtctcggtcttcctatggcggcgatgagcccatgtaggagacctagcccatagatggccccggttttagcttcatgacactgtcgttgccgcctgtgacaggcccgaagagccttgcctttaaccgcaacagtgacgaggcctacacccactgctccgatggctgcatcctccggtggcacagcgcggctacctcggctggacctaattcacctacaactcctgcacgagtaggtgttcttttctcctaagatgaagattaagtttttacgcaaaacgagatggtattaacgtatgattgattgaattttaattattacaaacttgaaaaatggattaatatgatatttttagagcaactttcatatagaaagtttttgcacgaaatgcaccgtttagcagtttgaaaagcgtgccacgaaaatcttaatcttcatccaactcttgttggagaaaaaaacggtagcaagctagctgcaccgtactcttgatctctacacgagcaaacactgacctgcaaactgcaatttaattaattactaggagcatcagggtttccgcggtgaagaagaagctggttgtgtcggagagcgtgtagcggacgatcgatgccgctgtagttccacaacgcgtacggtgacctgtaacgttgtaccattactggagaactggtatttcgttgtggtatctaaaattacaaatatctcagctagattaagaacaggtactaaagatgctgtagtatcggttttaaaagtccaagtctctggaaaaatttttagttccgattagtgttaccaaccggtacaaatatctcgactagattaagaactagttctaaaagtcacaatcccagaaaacatttttagtcatgattggtattaccaactggtactaaaaatacatcttttgtactggttggtaacaccaactgatactaatgttggaggatctttagtcctggttggtaataccaaccctgactaaaaattcatttttagtaccagttggtaacactaatccgaactaaagatatttttagtaccgattggttagccgatactaaagatgcctccagggttagtttaaaaagaaagcatctctatccaagtcaaatatgtgtgggaggtaacatgcacgagggctgaggtgagagatcatgagtttgaatcccacatcccacacaatttttttatgtggtatgcatctttagtactggttatttcaaccaggcgatttttagtaccgatttacttgtcatggtttctacaaccagaactaaagggggtttccaaccggtattaaaaatcgtttcttcactagtgtacgctgatgatccctgagtatgctcgagctccacgctggcagccgccgcctccaacttacatcccccttcactaccgtcgcacgcctcatctccttaccgctgtctgcacaagctctggtggagggtagcagccggcgaggttgtggacgacaccggcggggcaagctctgcatctacagccacctcggccctgcctccatgctgaagcagctgcaaccgcctccgccgttgctgcagccatagtggagagtgggaggtcaaggtaaggccatgcggggcattgtccagattcaaacatgagtaacaattttattgggagaattatttttacccgtttgaatttttctataaaattatgaagtaaacgttgtggacattttttttccattagtatggttctgtgggtgcatgagatgcatggaatgaaaaaacaacattaggtacggtaggaaaacaacattacactatcagagtgctcgaagttgtaacactagatatacagtaacattgttatctgcatcttgccatcttggtcataagcttcgatatatcacccagcattacaaaacgtttttctttttaaggagaaagaagaggcgatcaaaaccactgagttgaatatcatgtgaacttacccacctgtcagcggtttctcatgcttgtggcctggcttcagcaccgctgcgtcaactaccatgaccaaattcatcactcatgcataaggcaaaatactcctacagattaagagttgattatatgcatacggccctttcagctggaaaagtagttatacagtgtcatgccccgatgagctcatagggattagggaggcacaactgttctgcttctttcctgaaaaataaaaaaagataggtaaaaaaaaaagatgatcatgaattggaagtgagaatccttcactatatgcatgagcattactgcaaaggcaaaaactagatgaactggaatgcttgtgtttgagtgatcccattataaatattgaaggtaggggtatgcattgttaattaggaggttaattcacatttttcacacactccattaaactcaattggctcaaaatgcaaacttgtttcagaatgggaatgtaccgaagcaatcaactatattgaaatgggtatcaatatatagactgtattggaatgggatactgaaacaatcagctatatatatacctggccagtatttatggccatagttactctaactaaatgtgagatatgggagtcaaacaaaacaaagtaaggaaagtgatgatgtaaatatgttggcggaggtggagctacagtgacttaggggtgcacaggaacccggttcaaaaatctttgttagatatagttaccatgtgtttcagttgtgcacccctaggccaactatgtgtaccccagccaactacgagaccgagcaacgaccagaaagaatatatgcttccatgcatggctgcagctagtatgcttttaggtatttgcaagtcagaaactcagtatatgacccatgcgtggttcaccatatccctccaagtctccaacttctactgatttcaatttgtaatcacgatcaagcaaactgaatgcccttgcgcatctgtgcagtgcactgccagtgccacctacggttcgtcctctaatcatgccatcagccattaatcatataacaggcattcaagcaagtccggtaaggtttgaaatgcaatttcaagcaagttaattgtttgattttgcaattccaagttagtttttaaaaatataatatatttgtattagacaatttcatagttagcaagtcctgtaaggtttgaaatgcaatttcaagcaagttaattgtttgattttgcaattccaagttagtttttaaaaatataatatatttatattagacaatttcatagtttaaaattagaaattaggccattttgtctcatgatttcaatttgtaatcacgatcaagcaaaccgaatgcccttgcgcgtctgcgcagtgcactgccagtgccacctacggttcgtcctctaatcatgccatcagccattaatcatacaacaagcagtcaagcaagtcctgtaagggttgaaatgcaatttcaagcaagttcattgtttgattttgtaattccaagttagtttttaaaaatataatatatttgtattagacaatttcatagtttaaaattagaaattaggccattttgtctcatattaagatgacacaaatattagggaagttagtttttaaaaatatagtatatttgtattagacaatttcatagtttaaaattagaaattaggccaaattaggccattttctctcatattaagatgactaatatcaaataattagaaggggtgaggcttcgaacccaggtcgtctagcccatcaccttgtggagctagccggaaggcgccttggtgttattccttttttggatggaatagataatttcattaattaaatgaagtagcattatgtagttctacaatttgagaaaaccttttttttgtgatattaagtcataccatctttcactattatactatactaagttactgagcaatattttcactcggactctccatttcggtaagaatcttcttttccttacacttttgcttatgttgattattgatgccaaatattagtagtgtcctatttgctatcaataaaatgtcatacagtatatagtggtgcaccccttaatgttgctctagctccacccctggatgttggaggccactggatgttggaggaggtttatatcgacatctgcagttgcgtagtgaataggcatacacacccgtgatacattatagatttctagacttcataaagtcctgtatcatcgatagagatctatcccatcctagttaaaaaccaagtgaggatttgataggcgggaaatatgtgtaaattcataaacaatatttacgcagtctctgatcgaatttcagtttaaccaatgttatacctaactaaattacgtattaaacaaacttccatttccacaaggtgatatttgtttgttgttgtttaatgtaatggctcgttgcagtgtgccggtcaggccaactctgtcatatcagcacgccggtgatcgtcaccggcaatttactgcgagcatgattagctaattggacaagtggagcaacaaaattataagaaagtttagaggggagagaccaatggttacatgcgactatgcaagcttcctctagaccgtgccaaataagcaatcatatccttatccttatgaattaaaagtctttaatacaccgccacaatataggaaactacttatactagttataaagaggattccaatctgaaattttttgccttcgctattgagcacattctttaaatatatgatagatcaagccccacacatgaaagtagagttgattttgtctccaggtaaaactcataccgatcagctgaaaacacacttagtgtttggttgcagatcgtctcgaccatgagctcatgaagaggtacacgctctgcttaattttgcttcctattttactgataactagtactatgctcgtgcatcacaaagagacctagagtagtactgagtcgatcggttcggttttttatgggcgttgcgtgcgataggagagggaggaggacgactatgacctgatgtgctggtggcaggtgggcctcccacctgcaaaaaaaataggtttatttttacatgtgggcctattattagcctgtgaattttgattttcacatgcggtccttgaactgccttaaggggagcgatttttgcatataggggcagttatggttcatctgtgatctagaggggttctcggctggtagtgtgattatgattaatttgatgttataataataactgcataggatcctgatccgctaaaacactgatctagtttatggatggatagtgtgaaactgtcaatccccgagctggaaaaaggatcgtgagatgtgagaactagaggtagaagaagtccttaaacacctatgcatatatgcatgaccaatggcaaaaactggatgagctagttattgcctggatgcaagagcaatcagactttcagcataaatgtgggaggcatgtgctgccaagaagtatgcttagtttccaaagttcctatcatgttgtggatatgggatgttaaagggaagggaacaagaatatgggatgttaaaaggtaagggaataattggactcatttatcatccctgacaaactcgtcattgtgaataggagatgttggagagaaacaactgtaactatcaaacaattgtgcccagattaatttaccgtaattaaactacgatcgtcaacgccaatgttcatttcctacatgtagcaccttgagcacgcccacctgtcgtcgccgccatggcgatcatccgtcgatctacaatctgttctagaacaaatgtgaactggctcgctattgagccgaggaaagaaattacatgaagagatattttataaatagaaaatacgaatgtgaaactggctcgctattggaccgaggaaagaaattacacgagatatattttataaagagagaatccttcgtatggaaacctatagatacctcaagccgaggaaagaaattacatgaggagatattttataaacagagaaacctatagatacctcaagccgaggaaagaaattacatgaggagatattttataaacagagaatacgaatgtaaaactccgaggaaagaaattacacgaggagatattttataaggagaaaatcaaacctatgatacctcaagctattataagatgcctacaaaatgtattggagttatgagatgccaggattgtgtttgactgttgggattcctcgtacccttagggtgtgttcagcacccttggtcccaacaataacattgcgcacaaaaaacagagcggttcattagcgcctgattaattaaatattagctattttttttcaaaatggattagttgttttttaagcaactttcgtatagatactttttgcaaaaaaaaatgcaccgtttagcagtttgaaaagcgtgcgcgtgaaagacgaaggagatgggttggtaaacagggtgccgaatacagccagttcctttaaaaaattgcatgacgttggcttatttctacatcacgtagctcatcatttttactgcatgtatatatatgcgatctttgctatttttatcatttttagttcattacattcagcctagtttatatattaaaaatctatattgttattagaaaaaaaaaagcatgatggagagaaatgatgaatcaaccaacatccttaccgcctactcctacttttgaaaaagaaaaaaaaacagtctagggtcaaaaagcccacttgtctgctgaaaggaacatgtgcggaaattagaaaagctgcgtccgccactggttggacccaaccccaaccccaggttcccaactgccgctgtcgaacggagccaatttgccttgctgctactgctgcctgctgcgcattgtcccggagaggagccgtttctgctccccagtcaacctgacggatcgcgattcatctcctctcgtccactttatctgtgtcatcggccgggaggtggttgttaattttttttttatttttccagctttctagttgcctttttacacaacgatatttgttttttgcttttactatccatctgatccgacggctgctatattctctccttgtgttgtcgtttttctgaatctgatggtcacttgtttgttgctttcgtggatcgttctcgataagtttttagttttacctttcactaatgtagatacggagggagtaatgatacgtaaaacgagatagctatttgtatatgattaattgaattttaattattttaaatttaggaaatgaatttatttgatattttaaatcaacttctctataaattctttttaatgaaatatactatttagcagtataaaaaatactattgaaaaaatgtgttaacgaaaatcgaggtaaaatatgtatctgattcaaatggggctgaacacataaaaggtcatattaatactctgcttccttcctgctacccgggttggtagagggaataggacatcatgtcctagatgtgaaagtccagtatatatgcgttggtagacaggataggacatggtgtagctagcgcacgcgcgcgcgagaacttttaagccgcgcgcgcgggcctccgcctcaagcgcttagcgcttttctggaaaaacaacgaaacgttgctaattcaaataattagcactaatcacgaaatgctacaataatttctcaataaaaatagaaaaaattgattttgaatttttgagtaaaaagtttacaaatattgacttgaaaattttcaaaatatgatttgaaagttttctaaatattgacttgaaatttgaatttttttaagtcaaattttgaaaactttcaacttttaatctcaaatttgaaaactttcaactcgaatttgaaaactttcaacttggatttaaaaactttcaactcgagatttgaaaactttcaactcggatttgaaaactttcagcccgagatttgaaaactttcaacccgagatttgaaaactttcaactcggatttgaaaactttcagcccgagatttgaaaactttcaacccgagatttgaaaactttcaaatatatccagatttgaaaaagttgaaaattttcaaatcgagatttaaaaattttcaagtttagatttgaaaattttcaactcaaaattttaaaactttcaaactcaatacatgctaaagataaaaaaaaatcagaaaaaagtgggaaaaaaggttaaaaggtaaaaaaacgagaaaaaagaagtgtggcggtcgctcgcacgccagcgcagcggcgatgggccttctgggcctgaaacgcgcaccgccggcgcgcgcgctaactagcttttccggggacatcatgtcctagatgagtccagtatatatccatgactacggccatgcttagatccacttgtaaaattttacaccctgtcacattgaaccctgtcacattgaatgtttggacacatgcatagagtattaaatatagatgaaaaaaataactaattacacagattgcgtgtaaattgcgagatgaatcttttaagcctaattgcgccatgatttgacaatgtggtgctacagtaaacatttgctaatgagggattaattaggcttaataaatccgtctcgcagtttacagacggattctataatttgttttattagactacgtttaatacttcaaatgtgtgtccgtgtattcgatgtgacatgcaaaaactttacacccacgaaacaaatatactataaaaaaaactcaatggtgaatttaaagaaactaaattgatatgttactatattttcttacagacttaatttaacttaaaaagagttgacttaggtcaaactaaaacaagtaatccgtttcaatgacaatatgaaaagaacaggagctacggccggccgcaacacaatgagatcaaactgatatttatgttgaaagattattgattagtcttaacattcgatcaataatctggctcatccagtttttatgatgtaggttgtgtttagtagccaaacgaaaaaaaaacttaatataccttaaacaacctataatgtggaacggatgaattagtacgtattaacaagtccactctcacacaaatcaaattaaaataatcaaagggtggttcttttttcctgagaaccatcagtatatgaactaatcggagttaaattttggttccaagatagatttcatactcatactgcctagctggaaaccgattgagatgaagtgcaactgcatatgctacgctattgtcacttcacagtaacaactaaactcaatctctcggccatctgttttgtcatccaaagattcaagaagagtactgctatactaccactacactaattttgcgacagtgcgtacaactgtgaatccccactttccatacagatcctgtgatgcacatactgattaagattaagttgacgttagctaaaacacccatctggtttatggatggatactgtgaaactgtcaatccccgagctcagagaaagataagattgggggtggaaaaaggaggtagaaaaagtccttaaacacctatgcatgcatatatgcatgaccaatggcaaaaactgaatgagctagttattgcctagatgcaagggcaatcagactttcagcataaatgagggagcgatgtgctgtccagaagtattcttactttccaaagttccaatgtgcttgttcaatctaaccttatatatatatatatatatatatatatatatatatatatatatatatatatatatatatatatatattacagtgaatatgagatatcaaatggaacaattggactcatttctcatccctgacaaactcataaagttacagtgaatatgagatgttggagaaaaacaattgatcctatagtcgttgattcaaatatttttgccactcacagtatcacctacagcacatttattgatgtagacaacacttcaatctcctgggtcaaatgatgggtcgtcgattttttatctatcctgcaacgaatgtgaaggtagcgagctattgcagagaggtcagaaacaataagagaacagactaaagcgttattataaatccatggtggcccctataaagtactcatacccacaaacacactcagcgatgttagcagccacctcggtctccttagtcggcctcgatcacgaacatgaagctggcgaactattgcactgagacgtgaagctggcaaactattgcaccaaggaaggaacaacaaacgaacaagaaacaagcaaactattgcgtgaaggaaggaacaataagagaacaactaataacctattatacagagatatttcataaagagataatgtattatacaaatatttggagctatgaaatgactagaaaatgaattatatatgtttgttttttgagattaattgtatcgttaattccattaaaaaatcacaccacttctatttatttcagtctcatgtagctcatcattcttcttgtatgtatgtgatattcattatttttctcattgttagttcattgcattcagcctagtttatacattgtaaatctatattgttcttataaaaaaaaagcatgatgcaggtcagtggtcaataagccatcgtccttaccgcttgctcttactttttaaaaaaggaaagaaaaaaatagagtatggggccaaagagcccacttgtcagctgtaaggaacatgtgcggaaattagaaaaggaatatttatagaaaatggtggcaaagacttagactaattgatggtaatgctctttttcaaaattctgttgtaacacatgggcaatatgttagttttttttttaaaaaaacatattcttcccgcatagactctaattaaaatttcaaaaatattcttggacaaatatagtagtgcatatatgcttatattcttagataaatttaaattttttcaaatcttatattattagatagaggaagtaatgttggtagtcggttcggtttgaacctactgaagattaatcaagtacagaaacgcgaaacaaggaagccattagcgtatgattaattgagttttaattattttaagcataaaaatggatttattagatattttaaagtaaattctttatagaaaattatcacacgaaacatactgtttagcggtttgaaaaacatgctaatgaaattcaagataaaatatgtgcgttaatcaggtccaaacagggatcagtgctgaattcatgaaggagtatatattaatgctctgcatccttcctgctaccaaggttggcagaggaggggattatgtcctaaatgtgaaagtccagtatatatgcatgactgcatcacaaaaactggatgagccacatcatcgatcgaatgttaagactaatcaataacgtttcaatataaatatcagagctagtgctatgggagaaacttcatacgattctcaaaacatttgaaatttctaatgtgtttcctaaacatgacaaagtgaatcaattatgaaatgttggagcaagacaagattgttagactttgcactaggatcacctaggttagatctagtcgggtggttctatttgggtttgatgaacgacattgtagatgaaagggagagggtttagataccgaccggttgaggagttcgtggaagaagaggcgccggacatcgtcgttgtcgtcgcggcttgacgtggatgcggcgccggcgaggtcgacggcgatgacggctgcggcagtggtggtcgtagacgtcccggcgatgaggcgtggcgcggcggtggcgtttcccgtcactggctgcgccccctctcgatcggattagggttttgtggggtggagttggcggcggcggtgaacttcgtaccgtgtgccgtgccggcctccacccctcttttatatggcgcagtgtgacgggggcccaccagccattgggctgggcgcccccgatcagggcgcggtcaaggcccccttgagccgttgggctcaaggggagggagatctatctaacattctcccccttgatctcactttttcttttagctttttctattccatcacagatttgtaaatagagcatgtttcatcgtcacggtcaatcaccgatggattcgacagccactatacacatctctattcagaaacagatactttacttttgggccctgtagtccaggattcataaggcttcccttaaacccatgccggctacatgttccttgaacacgttgggtggtaggcctttcgtgagcggatccgcgagcatcctttctgttttaatgtgctcgagactgattgtttgatcccggactttgtccttcacaacatagtactttatgtcaatgtgtttggcagcaccacttgactgattgttgtgagcgtacattactgcgggttcgttgtcgcagtataactttagtggtttctcaatactgtcaaccacctttaaaccgggtatgaacttctttagccagttcacctgccccgttgcctcatagcatgccataaactcggcatacatagtagaccctgcagtgatagtctgttttgagcttttccatgaaatagctcctcctgccagggtaaacacgtatcccgatgttgactttgtattatcttttgcaaagtcagaatctgagtaccccactatttggagtgattctgatcttctgtaagatagcatgaggccttttgttccttgcaaataacgcaagactttctttaccaatttccagtgctctaggcctggattactctgaaatctgccaagtaacccggtaacgaatgccaagtcaggtcgtgtgcacacttgcgcgtactgtaggcttcctacagctgatgcatatggctttgttttcatttcattgagctcatactgatttctgggacattgcgatgccccatacttttcgcctttcattataggagcaggtgtagcactgcatctgtacatgttgaatttcttcaacaccttttctatatatgtcttttgagaaagtcccaatgcatactttgttctatctcggtgaatctctatgcccaaaacatatgaagcctcaccgaggtctttcatgtcaaagtttgaggacaagaatttctttgtttcctgcagtagactgacatcactactagccagtagaatgtcatccacatacagaattaggaaaataaatctcccatttttaaactttgaataaatacagttgtcctcgacattctcttgaaacccaaatttctttattgtcccatcaaacttcaagtaccactgtctcgaagcttgctttaatccataaatggatctctttagacgacatcccatattttcgtttcctttcatgacaaaacctttcggttgcgccatgtatactttttcctccaaatctccatttagaaatgccgtttttacatccatctgatgtaattccaaatcataatgtgccaccagtgccattataatcctgaaggaatctttacaagagactggagaaaatgtctcattgtaatcaatcccttctcgttgcgtgaagccttttgccacaagtcacgctttaaacttttctatattccctctggagtcatatttggttttgtagacccatttacagcctactgttttggctcctttaggaatttcttctaaatcccaaacatcgtttagtttcattgatttcatttcatctttcatggcttccaaccattcagatgagcgagcgcttctcatggcctcttcatatgaggtgggatcatcctccatatgcgactcttctatattataaactttatagtcatcacggatagccgatcttctgactctttcagaccttctaggggcctgcacatttggcacatcttgtacttgaggctcttgatgagtctcctgtactggcacattatctatttgaggctgttgtagctcctcctctggtgtggcaaccatttctgttgaatcctgtataacaggttccttactctcattcattgttgccacaggaggggtaacaacaggtgctggtacctcaatgacaggcattgcaggcacaacatcagcaggtagagagaagaaaggttcctgagtcgacggagcgggtacagacacccgcctctcctcaagatcaatttctcgaactaccgagctccccctaatcatttcgtcttccaagaagacggcgtgtctcgtttctacaaactttgtataactgtttggacagtagaaacgatagccttttgatctttcaggatagccaataaaatggcaactgactgttttggggtccaacttcccaatatttgggttaaatactttggcctctgcaggactcccccacacacggaggtgagttagcgagggtactctccctgtccatagctcatacggtgttttgggcaccgatttgcttggaactctgttgagaatatgaatggcggtttttaacgcctccatccataaaccgagtggtagtgtggagtagctcatcatgctgcgcaccatatccataagggtacggttgcgcctttcagctaccccattctgttgaggttcgcccggtgttgaatactgggctactattccattctctagcaagaaccttgcaaaaggtccagggacttgcccataaggcgtatgtcgaccatagtactcccccccacggtcagatcttactactttaatctttatatctttatccagtgcttctgatcgctctttaattggataaatataaccatagcgggagtaatcatctgtgaatgttatgaacgagtcatagccatccacacttttcacaggaaatggaccacaaatatctgtatgaatgatctctaaaattcctgcgcttcgttttgcaccctttttgatgttctttacaaattttcctttaatgcattctatgcattgttctaagtctgagaactccaatggaggaagaatttcattcttaactagtctctcaattctccccctcgaaatatggcccaaacgacagtgccataatttcgatgagacatcgggagttcgctttcttttcttgttttcttttgtcaacgaggacacaacattcacattctcagaaagagataacaaataaagctcgtctcgcaacacagcaagaccaatacatgcattattatgccatagttcacatttgccacttccaaaacggcaatcatatccatcaaaatccaactttgatacacttattaagtttctttgcaaagaaggaacataaaagacatctcgaagtaaaagtatgaagccattcgcgagctctagaggaagatctccaacagcttcaactttttcttcaactccattggcaactctaatggtgctttctcttctttgcgtagtcctcgtcgaacggaatgcctttaaacaattacaagcatgaatagttgctccagaatcaatccaccatgtggatctagagtaaccaacataatgagattcatttacaaatgtaataatgttctcacctttctttgccatgatcattttcaaaaagtcaggacaatctttcttgtagtgtcctgtcttcttgcagtggagacattgatctttctcaacagcgaactgttgttgctgaggcagatgctgagactgtttgccttttgaggtgggagacttgtggttctttttcttatctttaacatagtttattgaaccaccatttgattctttgattctctcctcctcttgcacacaattagcaatgagcttctcaaagttccatttctctggacttatgttgtagttgacaataaaattgtcaaactgctttggcaatgaggccataaccagatggaccagaaagtcatctgttatgcccaaatccattggcttcaacttggaagccatgttgctcattctaagtatgtggtctctaacaccacctccatggtacctttctgtcacaagctgcttgatcagctgtgtagcataagtctttgaagagccagtaaactgactctttattctttcaaggtactctgagacagcgtcacactctgggatcgagcccaatatggtaggctcaatcgtattctttaccacagccaaacatttcttgttggctaaggaccatttcttttgttcaatgtcatacgacatgacgagaggagcattgtccctctgtctcttttgccagtcagcatctgactcattttcacctctgacaagttcagcaggttctataggacatggggtagtcaacacccagtccacctctcccaagataaaagcaaggtcgagttttcttttccattctgcgtagttatctccttttagggtcggaatatctttaatgcaacccatcaaggagtagccacctgaaataatcatgtgcggtgagaacaaaattaacattaaaatattatgcattaagcctacatcaccgttgggcagaattagacataacacatataaccataactataatattgcaattaacaacgttggtcagaaaattacaacatcatagcacataattaatgttcctaaaattaaattctcccgttggttcgaaatttaattttagaaacactaattttcatcaatttcatctatttgcagcggaaaactatataaaatcatatgaacagtagcaaaatctctgtaattctctctctgtgaaaattctcccgttggttcaaatttaaacagaggtaaaacatgcaaaaatctattcaaaattctattgaaatttgcatgaaaaatcgacaaaataaattggaaaaaatgctactgttctcttttctttgttttcggccccgagggacctcaaacagactttttccggtcggcccgtggccttttggcacgggcgggcgcccccttccccaagccgcaacctgggcctgggccaggaaagccgccccccgcgcgcgccctcttgggccgatttcggcccggccggcgtcgaccgtccgatcagctagggtttcgatcggacggccgggcgccgagatcggaggatcaaaacccccctctcccggccggccgccgaaaaccctagcttctcttctctttctctctctcgggcgagcgcggtcgcgccgagcggcgtcgccgacgccggcggccctcgcgccgtcgcgccatggccggcgctcctttcttttctcttcttctccgctcccccaaccgtctctaacccccaccgtgtgagagagagatggcgacgacggagatggcggcgccgctgcgggccccctcgccggcacgcgcgtgcaggtgcgcgcgcggccgtcgagtggctcctaggcggcgcctctttgcccctcccccccccccccccgttgccggcgtcgacgacggccggcgacgaggtaagattagggttagggtttttggttcttttgatccgtgtggatcttgtgcttttctttctttggatttctttccccgaaacgatctaaacactagggttgctctgataccattgttagactttgcactaggatcacctaggttagatctagtcgggtggttctatttgggtttgatgaacgacattgtagatgaaagggagagggtttagataccgaccggttgaggagttcgtggaagaagaggcgccggacatcgtcgttgtcgtcgcggcttgacgtggatgcggcgccggcgaggtcgacggcgatgacggctgcggcagtggtggtcgtagacgtcccggcgatgaggcgtggcgcggcggtggcgtttcccgtcactggctgcgccccctctcgatcggattagggttttgtggggtggagttggcggcggcggtgaacttcgtaccgtgtgccgtgccggcctccacccctcttttatatggcgcagtgtgacgggggcccaccagccattgggctgggcgcccccgatcagggcgcggtcaaggcccccttgagccgttgggctcaaggggagggagatctatctaacaaagatagaactgtagaatacagaaaagagggttagaaacgaggatagtgaatatggattatatggtatgttaataaataattaggaaatttataagaaaatttataatatactaaagaaaataaccatgcgttgaaacggctaaaaattttttgggtcgaaagtttattcatttcttcttttcagttccaacctagtcctatatttccctccacttggcgtgtctttttttctcaaccataagtgaagctatatacccagcttaacctacagagacatacccgtgccttcttaatctcccagaatttgttgagggatagtgatttactcaatctcctctttccgttttttatcaaaatagaatctataaaactcgggataaaaataaagactactaaatagaaattaaatccaattaattaaagttgaaggaaaagatggagtatctaaaaacagtttttgggtgaaaaagtttcagatgtaactatagtataattaaagtgtaattacattataactacgttgtaactatagttttagatgtaactatagtataattggagtgtaattacgttgtaactacattgtaactgcactgtaacaacgatataacttattaaaacttgcattcaacaatcctttggttagatagcactgagatcttacgcatgacacgtgtgaaaatttttttgtagcaactttttcctcttcatgtacaaatgcgatccgatagtcacgaattgaaagttttagaggcaaaaaaaacttatgaaatttttctagcaaatctgattgaaaggggaaatcacactggtggagaaaccatctttgggcggtcgaccagattttacaatagccccggttgtattaaaaaccgggactaaaaatatctttagtcccggtttaaaagctacagggtacttttcaatctttagtaccggttagtgttaccaaccgggactaatccgggaaaaaagatcgccatacgcactaaagatctatttatagtcctggttggtaaaaccaaccgggaaaaaagttcgacgcggagatcgaagaggtgtgcgcgatcgaatcgaggtatctcctcctctcctttaactcctccctcctcctctcatttttaactcctctcctcaaccttatttattcttcttcttatctctattcctctccttctcctctccttctcctctctactgctaggccggcgcgagggcggcgggtcgcggagggccggccagcgaggcagcggctttctcttctttttttttttgagaatatgagattgttgtgtgatgtatttgattggatctgagattgttgtgtgatgtgtttgatttgtgtgtgatgtgaatatgtgatgaattttgtagaagttgtgatgtaaatttttaagattttgtgatgtatttgagtatttgagatgatcgatttgtggatttgaggcaatttgaggatgattgatttgggatttttgggatgggatggggtgaaatcaatatatttaaaaataatgaagaaaagaaaagaataaagaggaaccggaaagagcaaccggattagcctctttagtcctggttggtaacaccaaccaggactaaagatgctttatctttaggactaaaaatggatttttactcccggttttttcacccgggactaaagatagcgatctttagtagggaaaatgatgggggagtagtgggaaattacaataaattggaggagcagtcacatgaaagtcaaattaacatggtggcgacgctaggtttggcccgactcaaaaaaaataggacgaaaaaagcggatgaaaaaaaaaaggaaaaataacagcgaaaaaatatgcagaaaaaacggtgaaaaaaaagacagaccaaaaaaccacctggaagccttaggtatatttttagagtaaatttcacaaaactacatatactatgttcaaattatcacaaaactacacatttaacaccaaatttatcataaaactacacatttaagatgaagtgtcacaaaatacatgtttactaactaaactatcaaaaaactacaggtttaaatcaatttagtcacaaaataataatgtttatagcttgggatttaaactctaaaagctatagtttggtgataacttcaatattaaatatacagttttgtgatacttaatcttaaatctattgttttgtgataaatatggtgctaaatatatagttttatgatacaatgccttaaatcagtagtttgcgataatttgatcaaaatacatgtagttttgtgaaatttttattcatatttttgatgtgggaccaaaatcatcttaaagtggattccatctgaaagatgagcgaggtggccggtggcacgaagaggaatgagtggctggtggcgcgaggaggagcaagcggccggtgacgcgaggaggagtaggagggagaggctggcagcatgaggaggagcagatattagcggcgcgaggaggatcaggtgaccagcggcgcaaggaggaagaggttggcggcgcaaggaaggaggatcaggtgactggcggcgtgaggaggaagaggttggcagcgcaaggaggagcaggaggccgacgacgcgaggaggagaaggcatccgacgccgctgtcgagagaagtaacctccgcgtgttgacgacatggttggggaccggggagagctagggttttctttgcttttatatcatcccctatgtggacttgatgggcttttctgttgggcctttgtcaaatgatcatatatatcaattattttctgggatttaaggtaatgggcctctattatatttctatctttcttaatttcggggacccatggtggaacccttcacccagacccggccccacatatatgcgggccccgtacccgcccaacctgcggtggaaaaccagccctgtccccgtccccgtccccgtccctgtctccgtaggggtgggtatccggcgggtccccaccccctatggggaaattgccatccctacccatccgtgcgctgcccctcctcactcgcccctggagagatgatagaggagaggggagagagagatgaatagaggggagttggggagaaaagaggaagaagaggaggggtgaggctgacatgtggggcccatgtgggccccaccattttaaattattttttttgtgtgtaactgatatgtggggtcatggtttttattatttttctgatttcgaattgccacataagcgccacgtcaaatgccacatgggacgaagaccaagtcaaactagccacgttagcgtcacgtcagccaaaaccaccttccaaaccaccaagggacctcgtttgcagcggttttgatagttgagggacccggtgtatctggtttttggttgaaggacgaaaatcggattcgttgacaagttaaggggtctcggatgaacttattgctatttaactggattagttattgggtcacatgaaaaagagacggtctattgggccacatgaagaagaagagccgagcggcccagcccatggagggcgagagagccagcaaaatctcagggacaatttgatgggctagatgtctgtgccagcaaagtcgcatgtggataatttgatgggcgagatggctagaaaagaattgtgtttaaccccttttcctttttcaattatagttttttagccggaaggatctgttaaaattgacaaaatcacaacggatatattgctattgaattttcaattatagtattttctttgagtcggaagactggaccaatatatcttgagatgaacaaagtcactacgagcacctcactatcgacgggtgtatcgtcccactaaaagaataatcgacaattatgttgactgccactgaaaaataattaatcataaatttgagcgcgcgtgttaagtttaaaacatgaacatgagttttatgatttcactaaaaaaacctaaccagttagctacacttacttcgttttcaattatgatattggtccatcctaaaagaatcactgttcatttcagttccagttatctcgttcccttttttattacatgtgtgtaaatcttcaacaattctatcattttttattttattatatttaagtttccatttatatacgcttaaaaaacttcgacaacagaatcatattatttgtacatcagcattaattaacgaagatttcgtaacgattttgctatatatttgtcgacaaattttctcccaaaaatttgacagatgtaattacagtacaatcgtagtataattacactgcaacttacatgtaattatactgtaactgtaacttgtatataactttcaaaaatctctctgtaatatgttatttccttacacatatgtgtgtgctgtgattttttttcttcctcaccaaaataaatcttgtaatagatttaacgattcaaaattacgtgaaacttatatacaagttacactgtagttacatgcaagttacagtgtaactgcatataagttacagtgtaattacactactattgcactataattacatctgtcaaatttttaggagaaaatttatcgacaaatgtatcggtggtccctttcgtaaaccttggctgagttagttttaagttggcatcggcaattccgcggcatgtaaaacgaggcaatcgcatgcctaattaagtattaattatttaaaaagttaaaaataatattatttgatttttttaaataaacttatatgtataattttaaaaaaatattaattatttaaaaagttaaaaatagtattatttgattttttttaataaaattatatatataatttaaaaaaacatcgtatgatagtttggaaagtgtaacgaaaaacgaggaaattgtctccactaattaaacgccccaacgacggggctaagagcttattattaaactttaggagggcaacaaaccaaaccaactctttcaatcacaaaataaatcaccaatttatccctactaaaatttaataatttgacacctttcctctataaaacatactacaccataaggtctcaaaccaaaatacacatccatgtttttgaccctaccaaaatcccagtgacgccaaattaagtttggcatcaacaaattagtctaagtttggggtgaacagactaattttttggtagggtttgttcttggcaacaaaaccaaataggacataaatgtccatgtagcaattattccaaaacagtgaaccggtgctctctctacagatggttgtggctaattaaatacccaatctctttttcttccttgtcgcacacacatgtttgcacagagcttagctctagctttcttgtgccagcagatgatcatcaagtgtcggaaaataatatcgttgaaattaaaccaaggaccatatatatggtgcccacaagagagttagagtctttggagagtacttgcaaagataataccagcttagcttcccataattaagcagagatagtgacttgacagagaacagtctcgcaccggcccccgtgcattaaacccggccaactgcccaataatcgattacatatatgaacaataaagattatactatatacatatttcagatattttcatgcatgcagagatcgatctacctcagctccaaagaaggtattagtattacattattattaggaaaatgaaactaaaattgatgtctctgattaaacatttatagattgtttagtaaatactgtggttgaagaaagtttcccttttagtcatatcagtggtcagattttgagttttaaattatttaaattctcctcccaagcacctgatacagagaaaattcatgaatttccatgcactgaaaatgtatggacttctcaaaaatacttatattatggtaaaaattttaaatccaaaaaattattatactttaaattagaatggagcacatattgtagatatttttcatgcaaattaagatctgcctccgagaaggtactaatattacattattattcgagaaaatgaaactaaaattgatgtgtcgattaactagctaggcactaattgagatcctcttcaatactgcatgggcagtactgctcaacatgtgggcctgcatccgctaggcaccgatcctaggaccatttcactacatatggatctcgccattggtacggaccggggcgtacggtacggcgagagctggacgccccaacgaacgctagatcagctcactactgacgggtactactcctccattaattttaagctctcgctttcggctagagatcgagagccgagctactgccggttcttggaatttcgatcactggtcatcacacattcagttgtgtagtgaccactgtgctatagcgctgctagctagctgctggcatgtcgcggcatggctagctggaggtagacaagaccagggttcacgaaaccaatggaatttcacgaaaatcggtcggttttcgtgaaaccactgggtcctggtttatgaaaaccggtcgatactagccgattttcgtacggcgttgaccaaaagttcattatcagtttttattggttttcggtcggatttcggtaaaccggtgaggagcagattttactacgaaatcgataagctaaaccatgtatgagatgtactctttctctgttctaaaataaacaaacatataatatatgatatgatctaatagtattagaatatatcatattagatactatttttatctattttaggattgaagaagtagagctgaggaaggaggaggacagctagcttgctgccaaagagatcactccgcatttttaggtcgtacgcctgatgatctgggatcgatctagcatgcattcaatatggccacagataccacagataatgattcgatcgtgtggctatggccgagtttagttcccaactttttattcaaacttccaactttttcatcatatcaaaactttcctacatacataagctttcaactttttacttcaaactttcaattttaatcaaacttctaattttagcgtggaactaaacacatcctatatttgttattgtacttgccgattctatggcctctttggtgaggttttatgcagcaaggtttcacaaaaccattggttgatcgaaaaccattttagaaagttattggcggtttttgctaaaaccattgaattttttttgaaaattctatcgaattttatcaagacattgaaaatcaattaaaaaaattatttcaaatttcaacggtttaccgagcggttcgtcaacttgaacggactcataacctcaaaattgcgggaaatgaaatgatcttgtcgatttactgaacagtacagctactctgaaaaatccagaactagtgattgttgaatcgagaaactttcctagtttatcatcagctagccagctgtttcttagagaaaattgaatagtagagccaactactataatatcatattaaagctaatgtgtacaagataacctataatgttgtctattttctttttattcttttttctctcacatatatatgtaatgcatttatcatgaagcatgtaaagagttagctcttacatgagagccaataattcattttttttctttgactctcttctacatataaatttataggatgagtctcctctaaacgtactatcctctaacgtgggttactaatatatggtcccactagttgtgaagcccataatatcaaccactcaaagttggaaggcaatacattataaggatctatttgcaatgtttatggtgggcttataacttactattgtagtttttagctcatcgagtaactcttctagcagacaagacctatataagtagattgttaacaagccgagcttccctgcctagactcgagtttgacacaagcttgagccatgcttgaattgagcctaatcctcctttgagcttataagcaggctcgactcaagctcgattaggctcatgtgctcgatcgagtatatgattatgtatattttaatgataaaattttgtaaaaagcaataattttactctatccgtccaaaaatattgcaaccttagaatgtgtcacatccgctcaaaggttgctatattttgggacggagggagtaattaacaatattgaagaaaaatatttgagaacttaagattaatatatgatgccaaaatacactaatttttcagatgaatctatactaatttatccttgagctactaacttatcatataaaagataaaagttacacacaaagttatgctcatgagaagctcgagctcagctcgataaagctcgcgagcttgcaactaggcttgggtttggatcgttaagagtttgagacgaactcgaatcgagtgtgaggtgagctgagctcgaccagctcgcgagtctccagcttttctgaaaaccctatacataagactggatctataaattaattttactcgcgagaagacgatgcggcttctttatccttgacgttgtattacaacacctctaggtggtagctaggcaggccagaggcatacctggtcctagtgtgacactgtagagtgagctcaactccactttaactctctctctcagttgatggacacacttacaccggcgcccaccgaatacacatcatatggtactccctccgtttcaaaatatttgacaccgttgatattagagcacatgtttgaccgttcgtcttattaaaaaaaaattgtgaaatatgtacaactatatgtgtacatgaaagtatatttaacaatgaatcaaatgatatgaaaagaataaataattacttaatttttttaataagacgaatggtcaaacacgcactaaaaagtcaacagtgtcaaacattttgaaacggagggagtacatagttttgacacttaaatagacagcttgattatgttcttagaaatttttcggtttgtaccttgagtgcaacaaaatttaggtcgccattgatttacatttccggacaggcttgtgtgggcaaaatcttaatcagataccatagctcaggttactatcgttgcgtgttgaggcctctagggacatggacccatatatggtcccatgtgtgcacatcttggtaggtgcctacattgtacttaaaaaaaatatctgagatattaaagctggttatgtttccctaaaaaaaagagctggttatgtgtagtcaatttacagtagttcgatgtagagggaattcattgaaattttttttgtctcttaacccaatcctattactccctgtcggtgacatgggaccgggagtatcatgactagaggcttgggcaggagcaatcacccacgtggcctgaccccctcgggggggggggggggggtcgggcccgagggtgatgtggccgcccccctctttgtctccccgaggggtcggaccgctcccgtttcggccccgagggctgaggcgccccgaccccttgtggattttgcaccgcgtgtatgggttaggtgagcacagcggggctcacctaaccgcatttattgcggtttggacgagcgcgtcacgccgcatgtaacgcagtgcagcgcgctcgtttatccggtctgtgactggtcacagaccgatcagatcgtgggttaggtggcgacaggcggtctgacgcacgcctcgccccatcccgtcaggatgagagcctccaagcactcgtccctagccggagctggcgtgttagctcctggagatggcacgtaggtcccggtcagatatatgccaggcttcatcccaaccattacaagcaagatattgtatgaagaagggcgaacatgcagattgctagactgacacgtggtggacaagaatgaccgatttgtgaccggtctgacactggtcatgtcgtcggcagacaaccatgtacccacgttgcacctgcttccggcggagtggaggtaggtatgggccatcccatcagaaggtcattcggacagcagccattgcaagtctccgcccatttatgaagagatgacagggtgatccccgaggtcagacgagtgaggacgcgtggccacactcaaaaacaagcagtgtttttagctttctagaaaaggcaagccaagtttgagtaaagataggataaagtccccacacaaaagaaagataagtagaggtggtgcatgtggtatccccttgagatataaaaggaggaccttgcccactgggggacgaggagagaaaaaggaggggagaaaaaagaggggaggactgaaagaaagagaaaggggagaagatctggagagtagatcccacgagaggaaaaaagggagaagagggtttctagagtaagagctctcgggttctccagctctttgtagcttcttcatacacagatccaccagaacacaggagtagggtattacgcttttcagcggcccgaacctgtatacatcgcccgtgtcttgtgctttttccattctcgcgaactttccacagactaggagcttagaacctcacccagagcccccggccgaaccggcaaagggggacctgcgcggtctcccggtgaggagccccacgctccgtcatctggcgcgccaggtagggggctctgcgtgtgtttttctaagctctcgcattctttcgtgtgcgccaagcttttcctgttcagcccaatggccgaacaagcaaaggcgcacaacctctctccgagtgttagcggtgacgacggggagccgaacccacgccgtcgagctcgtactccaccgccccctccacgccaaagtcctaggcgggaggaggcgctcgagagggtcgaaggatccgcgacttcgacatccacgggtgatggagaagggcgccgagatggggagcgtcgtctcctcgtctacggcgacggcagcacgccccagggcgcgctccaagctgcgggcgcgctcctacgtcacccgcccgtcgtccctgacccggagtctccagcccaacgttggctggacgacgtggccaacttggtcatgacggcgcggcggcgcctagatgctggtgggcggtcctccgccaccaagacctctggtactgctaccaccggctccgcgtcgtcaagacggagggcgcggcgagcggcggccgctgttcgccattcggccgccactccttcgtcagcgcctccgacccgggaagatcagcgtggggggccagatgcccgcatcggtatcgagcgccggcgtaatggtcgacgtgctgcccacgcaacggagggcgcctcctcgtccggagtgtcacctcaacacggacgcggggatcagccctccgtgcccccggttggtggtgtcggctgtagagcctttgtggcgagccttcggaacgtccgttggcccccaaggttccggcccaccatcgccgaaaaatatgacgggagcgtcaaccccgccgagtttctccaggtctacatgaccgggatcgaggccgccgggggtgacgacagggtcatggcgaatttctttcccatggccctgaagggacaggcgcggggttggctaatgaacttgccacccgcgtccgaccactcttgggaggatttgtgccaacagttcaccatggactttcaaggcacatatccgcgcccaggtgaggaagcggacttgcacgcagtacagcgaagggatgatgagtcacttcgctcatacattcaacggttctgtcaagtccgcaacaccataccatgcatccctgcacacgcggtgatctacgcgttcagggggggtgtgcggcacaaccgcatgctcgaaaagatcgcctcgaaggagccccagactaccgcggagctttttcagctcgcggaccgagtggctcgtaaggaggagtcctggacctggaacccctccggttccggtgtggcagcttcggccgcccccggatccgctgctcggacagggcggcgtgacaggaggaggaagaaaaggtcagcccattccgacgacgagggtcatgtcctcgccgtcgagggtgcttcgcgggccacccgaaaggggaggcctgcgagcgacaaaaagaaggaggccagcgctcccagcagggagcgccataccggcaagtggtgcaccgtccacaacacctcccttcacgacctcgcggactgctgcgcagtcaaaagtttggctgagcggacgaggaagtgggaggaggagaggaggcaggagcgccgagagggcaagtccccggcggttccttccggcaatcggcgaagtgaggccaagcagaaggcccccgccgaggacatcgatgacggcgatgatgacctaggtttccaagagcctggagccaccattgccactgtcgatgggggagcgtgtgctcacgtttctcgccggagcctcaaggccatgaagcgagagcttctggccgcggcccctactcatgaggcgacgcgccgggcgcggtggtcggaggttgccctcaccttcgaccagaccgaccacccaccgtgcgttgcccgaggaggacagatcgcaatggtggtttcccccactgtttgcaacgtgaagctggggcgtgtcctcattgatgggggagcagccctcaacatcctttcccccgcagcctttgacgccatcaaggccccggggatggtgctccggccgtcccagccgattatcggtgtgacgccggggcacacttggccgctaggtcatatcgacctcccggtcgccttcggtggatccgccaacttccgcacggagcgggtgaactttgatgtggcggacctcagtctgccctacaacgcggtcctagggaggcccgcgttggtgaagttcatggcggcggtccattacgcctacctccagatgaagatgccgggccccggtggccccatctctatccatggcgacctcaaagtcgcgcttgcttgtatggagcagcgcgcggaccacctcgccgctgcgtccaagcccgagggtggcgacgagaggcttggcacctctgtccccgccgccccgaggcagcggatagtcacatgcgacgaggtcccagtcaaggaggttgccctgggcgacggcccgtccaagaccacacgaatcggtggtcttctggatggcaaataggaagacgcgctcgtctccttcctgcgggcaaacgctgacgtcttcgcatggagaccggcggatatgcccggggtccccagggaggtgattgagcaccgtctcgccgtgcggccgggcgcaaagccggtccggcagaaagtgcggcggcaggccccggaacgtcaagctttcatccgcgaggaggtggcgcgacttctggaggccggattcatccgcgaggtcatccatccggagtggctggcgaacccggtggtcgttcccaaggcgaacggcaagcttcggatgtgcatcgactacaccgaccttaacaaggcatgtcctaaggacccttaccccctgcctcgcatagatcagattgtcgactccaccgcggggtgcgaccttttgtgttttctagatgcatactctggttaccatcagattcgcatggctagggaggatgaggaaaaaactgcattcattacccccataggaacctattgttatacgacaatgcccttcgggttaaagaatgcaggtcctacttttcaacgtactactcgaatttctttgggtaaccaaataggacgtaatgttgaggcttatgtcgatgacttggttgtaaagacgcgcaaccaagagaccttactctcggatctagcggaaacttttgaaagtctccgctccgcccgcataaagttgaaccccgataagtgcgtgtttggcgtacctgcgggcaagcttctcgggttcttggtctctgcccgaggcatcgaggccaaccccgagaagatacgagctatagagcggatgcgcccccccagcaaacttagggatgtgcaatgcgtcaccggttgcatggccgccctaagtcggttcatatcgaggctgggagagaaggcgctacccttatttaagctcctcaaacgctccgggccgtttacctggacggaggaagctgaacgtgccctcactcagttgaaggcgtatctcagctctcccccagttctggtcgccccggagccaggtgaacccttgcgactctacttagcggcgaccccgcaggtagttagtgcggcgttggttgtggagcgcgatgaggacaaccctcattccgcgcatccccaccctgtgctggcttggcccgggagagagcagggaggagaggcccccgagccgaacggtggcccaaggcccccgacgaccggagctggccctctgcccgcttgtcagacggttccaggtgcccccgacccccaggatggcccgggggccactgcgggaaggccgcacctatcgccctctgaccccgaggttaaccctgtgccgactcgacccgggagagagcagggagaagaggcccccgagccgaacggtggcctaaggctcccgacgaccggagttggccctttgcccgcttgtccgacgacgccaggagcccccgacccccaggacggccctgaggccactgtgggaaggccgcacctgtcgtcctccgaccccgaggtcgtcggcacagaagacaagtgcgccccgcgaggccgcttggacgaagagcgccccagggatgcggcccctggcgaagaggatcggccccaccgaaaggtgcagcggcccgtctactttgttagtgaggccctccgggacgccaagacccgataccctcaggcccagaagatgctttacgctattctgatggcttcgaggaaactgcgccattattttcaggcgcatcgggtcacggtggttacgtcttaccccctcgcccaaatcttgcataatcgagagggtacaggatgggtggtgaaatgggcaatcgaactttctgagttcgatttgcactttgaaccacgccacgctatcaagagccaggccctcgccgattttgtggcagagtggaccccagctcccgagcccgtcttagtccccgaggccagctcggacccttcgcaaccgcctcacaccgcccactgggtgatgcagttcgacggctccctgtctcttcagggcgccggtgcgggggtcacgttgacctcgccgagcggagacgtcctcagatacctggttcgccttgactttcgggcgaccaataatatggcagagtacgagggactccttgctggactcaggttggcagctggactggggatccgccgcctcctggtgttaggcgactcccagctggtcgttaaccaggtctgtaaggagtaccggtgctctgacccgcagatggatgcttatgtacgccaagtgcggcgtatggagcgccatttcgacgggatagagcttcggcacgtgcccagacgggataacacgattgctgacgaactctcacggctcgcttcctcgcgaacccagaccccaccaggcgcctttgaagaaaggcttgcccagccgtcggcgcgacctgaccccttaggggagacggacgcgcctgaccggcccccgaggcccatcggagtccaggcctcgggacccgaggggagcgctcccagctcccttagattgattgcttggatcgctgagatccaagcatacctcacagataagactctacccgaggaccgcgaagggagtgaacgcgtccagcgcatctccaaacgctacgtgctgatagaagggaccctctatcggcgcgcggctaacggaatgtcacgtcctgataaattcatcccgaaataaaaatcattctctaaaaggaataatagaattaattaaaattcgaaaagaaattggcaaacactaaaatacgtacaagaaaaattcaaatgtgacccggagaatttttgttaaattctccttggtctaaaaggagccctcaaattttagtggaattttcagagcacaaataataattgagaagaaataaacaaagttgaaaaggtttataaaaagaaaaaccctaaaagaagtcttctttcccccccttcccttcttgggccggctcggcccacttctccctccctctctctctctcctcccccgcggcccatcggcctccccgcgcgcgcgcgccgctgacaggcgggcccgcccgccgctctcgctgacgggtggggcccacctgtcatctccctcctcgcgccgcgcccgccgccgcccgtgccctagcgccgccgccgccgcggattgcgccgcatcccgccgtccccgcgcgcattaaagagaggggaatcactccccgtgattccctctcccgattccccctcttttccctctctctctccctcggattcgttcgaaatcgcgcccgcaatcttcgccggcgttatcaatggcggccgagatctccgcggccggtttccttcctccccggccgccttctctcccttccgacgctataaaatcgtccctcgtgcttcgctcttccgtttccgccgctcgccgctcgctctcgccgtcggtttcgtgcccgcgccgtgctcctctctctccgccgtcgccgccgagctccgtttcgccgccgtcgtcgctccggtcctcctcccggctcggcgccacctccctcggcatcgccgcatcgccgtcgacctcgtccgcgcctccgtttcgctcgccgaccgtcggagcgccgccgtcatcgtcatcccgagccgcgccgccgtctccctccgctccggccgccgttctcgtcgtcgtcgttgtcccggggtgagccgaggaccgccgttcgccttcccccttccctcctctctctcgggcgccgctccgccgcgccggtggtcgccggtggtgaccatcggggcgcgggcgcgccgctcccgtcggccgtgccggcgaggccgccttcgggcgcgccctcgcggctgccaagtgggcccggccgtcagccgcccgcgcccgcgggtgcggctgacgcgcgggacccacggcgccgaccgccgccagccgcgtgcgcccggtccaccgtggaccgagaggctgacgcgtgggccccacttcccgtggacccggtccgcgcgcccctctcccggctgacgcaataatgagttttttttaattaaaatttaaatgaagaaattcgtaaatatccatttaaagagcatataaacttcaaagggccatatcttggccatttgaactcggaattggaccgttcaagtctctaatttttccttaagaagtcaagaacccatttttgtgctttgtttctgctgttatgtggagtttattagagtaaaagccttttcttttccgttggtcgtgtagacgctgcagcttcggaagatccgcttttcgtggaagtcgaagccggtgtttgggaaagcgagcaaggcaagtcacatcatccttgagcatattgaatcccagtttacaaaattatttttaatttaaattaatgcattatcgctttatttaaattcccgcgttatcactgttttatttagccctacctatttacctttgttatgaccttattattattgttattgttattattactttgttcaccctaggttaaacaaaaccccaactagtgagtactctatttatggttccactagtatgaacttaggtagatgcttcgctggttaattaggcaacattaggtggttttataactttagactttgggaagtctcatatcttttggacactatggaatggttggcttatgttggaattggacacacacctctcttcctctttcaaaacccctaaaacctgttttcggtggggtttgggtgcatgccagttgtgggaagtagcaccccggccactataaggatgaagctcgggcctctgttgcaaagcactaccgtacttccacatgtctaatgggtaaggcttagtttgtggctcagtctagtcataaacaaaagtacacggattggagatggatgaagtcgggcgtcgatggacattctccagggcaaatgaaggctacacgggctgcggcccggtagtcgagatgtcatacggcagagggttggtgccctgctgctaggggctcagttctgcctgcctgtcccgggtatcccggccgtaggtgggattgggtcggtactcttgtctaaggctaggatgggttggaaactatgtcacgtcttccgtccgtataccgtggtggtatgtggcacgtggtaacacgtgaggaagatgtgtcttgtgggtaaagatgtacacctctgatcagagtaaatctattcgaatagccgagccctcggatatgggcaagccgagcaatgtacccaagtcagtgttataattcttaaaatttgctcaacaactaaaatgtggaatggttggcctgggttggcttgggacgagctgggacccagggtcgggttgccagttcggtctgaatcatcgtaggccttgggttaaggcaggttcgtgagggttcacggccttgtttaataatactgtgtagctctagaatcgtctttacaaaatggctttgggcaactaagtgacttttaaatgctgtttactgcaaaacttaatccctatattattattcccttgtacctcccttgcattaattatgcatccgccggtgtggcttgctgagtactgtggttgtactcattcttgctctatctttctccccccttcagtaagagaagctttggagaagaagtcttaggtggagtcctggcttataccccagttgagcgcctgtgaagatggagccgtaggcccgctagtccgctgctgtttatttttgattgtcaggccttaagtgcctttgtaataatgtaaatattatcgatataataaagatgcgtcttttatatcatgtttgtgtggtgtaccccggcttttcctgggacggggattaatacactagcgttcgggaaaaggcaattttcccggtcgcgacaagctggtatcagagccatctcgactgtaggataagccaagtggataaaacctaaggacatattttataaatgaaactatttgcgaaagttcctttttcctcctttcccctatgctatttgcaaagggtttactcccttcttccttcttcggatttcaactagtactagatggtcaggtcagtgaagaagaagacatcgtcagttgtttgccgaagctccggaagactgcaggatccgctagcgaagcggaggaagcagtgaagccagctgtgaagcaggagtgaagatcttggagaacccgtcgcagaacctaagccaccctctagtgtttcgttagtcgtgtgctcctttgcttgtgtgtgtagcgcgtggtttgcatcggtgggttgtgatgtaaccatgctaggttgtttgcttaatcaacttgcagaataagcctaacatacatcataacagcaaaagacttagatttgttaaggtcctatccttagtttctaatctgtctctcccctttgttttccctctctccctctccaaacctttgcaacagatggctgacaatgagaaaggcaataaggtcagaagtcaggacattggtacctcaagctcccgagtgaatgaagcaccagacaccagttgtgtggcagtggtccaacacctgattaaccagaacaaattgcttatagagatactacagcagcatcggatgccaattttgaacccaagtcagatgcaacctcaagtgcagttggaggcagtccaggcactcacaccacaagtcagcgcaccgccaacatcccagaaggcccctcatgccatgccacatgttgacccaaaagaagcaagtatcatctgttttatgtgtgatgagcaagggcactatgcaaggaactgtcctcagcagaaaagaaaagcaccaatgcgaaccgaagatgaagtccgtaagatgatcattaccagcacagaatggcctccaccaggaatgacaaaatgtcagagaagaaattcctcccgaggtgcacaacagttgacagagcatcttttagctaatggaggtagagtgtctggtagtgaagattcagatcaagtctcctcagatgatgaagatgcgaagtctccccaaagttttaacccgaataaaatagaacttaaggcatgctctcgttgtggagaaatcggtcatgttgccagctcgtgtgcctctacatgcgttcattgtgaggaagaccatccacccggtgaatgccccatgagcaggatcacttgtttcttttgtgaaggaactgatcatgtaccaaaagattgtcaattcagttttctgctgacgaagaagatggccaaccaacccgccagttccaacggagagaagcatcaaggcaacacaaatccccgccaagatcaccgtttcagcctaactccagtgccaggacagaggaatcgaaatgagaaaagaaaatgccgagtccgggaagacatctgttgcttcaattgtcaaggaatgggtcatttcgccgacaagtgcccaaaaccgagaaacatagctgccggcacgtcagtccacgcaactccctgcaatcagaagcttgctcctcaacgaattgtcatccatgcatcccgaagcagtcctatagcccgcgttgcaacagctccaattccaatgagtgcactaccacaaggtgtcaatgctcaatttcagccccagccaccagctgacaagacagaggccagtatctgcgttgtacctttggaagttccaatacagcagctgagaaatcaagtacaagatgaagaacccgagtgtaagaaagttattgtttgttacaactgcagtgaagaagggcattactccaaaaactgtccccaaccaaggcaaaatcgacctccacattaccgccaatttacacgaagcagacattccaatcgtgttgtggtcactggagcaaacgccgtacccgtaaggcctcgtgttaatcagaacccatagcagaaacaatgcaccaatgctcctcctgccgcacctgactcggcaataaatcatagcaaccattctctgcaccgacagcctcagcaaagaattgtcgtagatggaagaagttgtgtctctccccgacctactccaggccgagccaagggcaatcaacctccggagggcgataccaagcagaagaccgtcatccgcttcaaccagcaatcagaaggaagcttctcctgtgaatgatagcattatgcagtcctatcacatcatcacagaaccaatcaaggatgcagtcactggaacaatgccagctatatctctccagaatcaaaatgagcagccatgtttgtggttttcagtccgctacttatcatggtgtaatcgaaagtttgcagcaatcatgtaatacataaatatattcatgtctataaacagtgagcttgctatgcttatggatgattcatgttgaggaaacaatgtaccgatgttaagcaccttccctttttgtttaagacagtgcctggtattcatgtaatatgggagaaatttgtaataaaaacaagttctaagaggattcttttgaaagatgcggatatgtgatcatgtgtataattgtttactgacaaaggagacctagggtctcgtgtcagaggaactatattctaacctcgagttaataaccaacctgaggatggaaaagaaaatcaagtgattaaccaaagagacatttgtttggactaagagtttcagatgtgtctttttcggatcaaaggcaatgacagtcagtatagcttttggcgaaacacttcaaggtttcactgaaaggtagcagaccaaaggacctcatcgccaccagaagcatccacaactctcggagtgaagagtacttagtgacaaaggtcaaaagatgattgatagaagatatcgaaaaagatgtttattaccaggcaaataagtaggtcgaaaggtgattgataagagaaatcaggaaagaacacatcaaggtcaaaggtgtaaaggaatacgttgaatgctaactgaggacaacatgaagagaatagtgggaagtgaaccaaatgtaaagaaagtgaatccgagttgcttgttcgtgggagctactcccagttatgaatcaagtgatatgttcgaagataatctacagaggtcagattaaaagcacatctaacaacgaagcctcagatttgacagggtaatgattagacaataacaaatccagcaataaagccattggagaagacgtcaaagtatgtcaagtgggataaattggttctcttgggaagcataacttatagttagaatggtcgacccttgcatcgaatagccgaagtacctagcaccggagaccaggaaagctaatatgagacagttgatggcaagttagaagtgaatgacaagcatgatattcttatgatgacaaacatagtatcctagtaatgacaagctagtgttgacgcatgacgtaaagtggtaacttgtctgaggttgactccgaagatatgaatcatgagaagttctggaacggaagcatcattaaactaccgcaacctagtctgagtcagccaaaaggtgcaccctgcttcgagtcaggtgaaaagaagttttgctaggcaagtttgttataaaagacgcagcggaagaagtcagacaagaagagaagaccgcccaacctatcttcttgctagcctcctcgaatctcggggacgagattcttgtaaggggggtggatttgtcacgtcctgataaattcatcccgaaataaaaatcattctctaaaaggaataatagaattaattaaaattcgaaaagaaattggcaaacactaaaatacgtacaagaaaaattcaaatgtgacccggagaatttttgttaaattctccttggtctaaaaggagccctcaaattttagtggaattttcagagcacaaataataattgagaagaaataaacaaagttgaaaagatttataaaaagaaaaaccctaaaagaagtcttctttcccccccttcccttcttgggccggctcggcccacttctccctccctctctctctctcctcccccgcggcccatcggcctccccgcgcgcgcgcgccgctgacaggcgggcccgcccgccgctctcgctgacgggtggggcccacctgtcatctccctcctcgcgccgcgcccgccgccgcccgtgccctagcgccgccgccgccgcggattgcgccgcatcccgccgtccccgcgcgcattaaagagaggggaatcactccccgtgattccctctcccgattccccctcttttccctctctctctccctcggattcgttcgaaatcgcgcccgcaatcttcgccggcgttatcaatggcggccgagatctccgcggccggtttccttcctccccggccgccttctctcccttccgacgctataaaatcgtccctcgtgcttcgctcttccgtttccgccgctcgccgctcgctctcgccgtcggtttcgtgcccgcgccgtgctcctctctctccgccgtcgccgccgagctccgtttcgccgccgtcgtcgctccggtcctcctcccggctcggcgccacctccctcggcatcgccgcatcgccgtcgacctcgtccgcgcctccgtttcgctcgccgaccgtcggagcgccgccgtcatcgtcatcccgagccgcgccgccgtctccctccgctccggccgccgttctcgtcgtcgtcgttgtcccggggtgagccgaggaccgccgttcgccttcccccttccctcctctctctcgggcgccgctccgccgcgccggtggtcgccggtggtgaccatcggggcgcgggcgcgccgctcccgtcggccgtgccggcgaggccgccttcgggcgcgccctcgcggctgccaagtgggcccggccgtcagccgcccgcgcccgcgggtgcggctgacgcgcgggacccacggcgccgaccgccgccagccgcgtgcgcccggtccaccgtggaccgagaggctgacgcgtgggccccacttcccgtggacccggtccgcgcgcccctctcccggctgacgcaataatgagttttttttaattaaaatttaaatgaagaaattcgtaaatatccatttaaagagcatataaacttcaaagggccatatcttggccatttgaactcggaattggaccgttcaagtctctaatttttccttaagaagtcaagaacccatttttgtgctttgtttctgctgttatgtggagtttattagagtaaaagccttttcttttccgttggtcgtgtagacgctgcagcttcggaagatccgcttttcgtggaagtcgaagccggtgtttgggaaagcgagcaaggcaagtcacatcatccttgagcatattgaatcccagtttacaaaattatttttaatttaaattaatgcattatcgctttatttaaattcccgcgttatcactgttttatttagccctacctatttacctttgttatgaccttattattattgttattgttattattactttgttcaccctaggttaaacaaaaccccaactagtgagtactctatttatggttccactagtatgaacttaggtagatgcttcgctggttaattaggcaacattaggtggttttataactttagactttgggaagtctcatatcttttggacactatggaatggttggcttatgttggaattggacacacacctctcttcctctttcaaaacccctaaaacctgttttcggtggggtttgggtgcatgccagttgtgggaagtagcaccccggccactataaggatgaagctcgggcctctgttgcaaagcactaccgtacttccacatgtctaatgggtaaggcttagtttgtggctcagtctagtcataaacaaaagtacacggattggagatggatgaagtcgggcgtcgatggacattctccagggcaaatgaaggctacacgggctgcggcccggtagtcgagatgtcatacggcagagggttggtgccctgctgctaggggctcagttctgcctgcctgtcccgggtatcccggccgtaggtgggattgggtcggtactcttgtctaaggctaggatgggttggaaactatgtcacgtcttccgtccgtataccgtggtggtatgtggcacgtggtaacacgtgaggaagatgtgtcttgtgggtaaagatgtacacctctgatcagagtaaatctattcgaatagccgagccctcggatatgggcaagccgagcaatgtacccaagtcagtgttataattcttaaaatttgctcaacaactaaaatgtggaatggttggcctgggttggcttgggacgagctgggacccagggtcgggttgccagttcggtctgaatcatcgtaggccttgggttaaggcaggttcgtgagggttcacggccttgtttaataatactgtgtagctctagaatcgtctttacaaaatggctttgggcaactaagtgacttttaaatgctgtttactgcaaaacttaatccctatattattattcccttgtacctcccttgcattaattatgcatccgccggtgtggcttgctgagtactgtggttgtactcattcttgctctatctttctccccccttcagtaagagaagctttggagaagaagtcttaggtggagtcctggcttataccccagttgagcgcctgtgaagatggagccgtaggcccgctagtccgctgctgtttatttttgattgtcaggccttaagtgcctttgtaataatgtaaatattatcgatataataaagatgcgtcttttatatcatgtttgtgtggtgtaccccggcttttcctgggacggggattaatacactagcgttcgggaaaaggcaattttcccggtcgcgacacggaatcctcctaaagtgcattcctcgggaacaaggcgtcgagcttctcgccaatatccatgaaggcgaatgcggagcccactccgcctcgcgcaccttggttggcaaggcctttcgccagggtttctattggccgacggctctcaatgatgcggtcgacctggttcggcggtgcagagcgtgtcaattccacgccaagcaaatccatcagccggcccaggccctgcagatcataccactttcatggccatttgctgtctgggggctcgatatcctgggaccgtttaggcgggccccgggcgggtttgagtatctgtatgtcgcgatcgacaagttcactaagtggcccgaggcttatccggtcgtcaagatcgataagcactccgcacttaaattcattaagggcatcacagcccggtttggggtgcctaaccgtattattacggataacggcaaccaattcactagtgagcttttcggtgactactgcgaagacatgggcatcaagctctgcttcgcctcacccgcccaccccagaagcaatggccaagtggagcgtgccaatgcggaaatcctcaaaggccttaaaaccaagaccttcaacatcctcaagaagcacggcgattcgtggatcgaggagttgccagcggtgctctgggcgaaccgaaccacaccaagccgagcaaccggggaaacgcctttcttcctcgtctacggcgcggaagcggttctcccatccgagctcaccctgaggtcccctcgggccaccatgtactgcgaggctgatcaagatcagcttcgcagagatgacctcgactacttggaggagcgaaggcggcgcgcggccctccgagccgcgcgctaccagcagagcctgcggcgctaccatcagcgccacgtccgggcccggtcactctgcgtcgacgacctcgtcctacgccgcgtccaaacgcgtgctggattgagcaagctctcaccaatgtgggagggtccgtatcgagtgatcggcgtcccccggccgggctccgttcggctggccacgggcgacggcacagagctgcctaacccgtggaacatcgaacaccttcgtcgcttttacccctaatggagttcgggtgtcaggttttgggctcgggccaaccccgcacccccctcgggcgtgtagggttggccgggggctaccacatatgcatattttttcttctatctgtatttcaataaaagcattttcgatttcctaaaaggctgtgtctgtgctgttgttttcttttgaagaatcttgacttgaaataggtcactcgtgctcgatcctgccctcgggagctcgggccggctaaaatcgccaaaaggggcccagaaccgagccgtgccccggggcgtggtgaactccgagggggaatcggcaaaaacccacaatcgggtcacccataaccctcggtcaccacgctcccggcctggccagtctcgacacgtggatctccccaggcactagccccgacccgcgccttttgaggactgggacctgggcacgagtccttagtcaagctaagacacaaaaggaccacggcacagatcatcctcatctcatatacatagcaaaatgaaattgacacagaaatttctttattttgattgcagattaaattaatctatacaaaaaggaggcccgaaggccttggaagaaagaaaagaagaaaaaactgaagattggcgggggcctgggggctcactccgatgcacccgggtcgccagcctcgtcgccactgtcgcccacaccgccgtcatcgccctcttcgtcggagttgagggcgaacgcgagccgaggggccgaaccctcgaagctgtggacgatatggtcggcggcatcccggacctgcgcgcgcgcgccgtcctcggtcccgggagggaactcgtccagcgctgtccagggggagaagacggggtccctggcctggtaactcgccagtacgagctccaccgctcctcgggcgaggtccctcgaggatgacttaatcgtcccctcgagctcctcggggagccgctggagagtcccggccatctccgagaggcgctgggcgaggcccccctggttggcggcgtacttcacagtccgcccgccccagagacccgcctgccgcccggcgcggtctaaacgggacacggcgtcgcgaagcatgctgggccctatctcgcctgccagacgaagggcctcgacctccccggtggacgaatccagtgcgccctgcagatccgcgatggtgtgttcggcagctgcgaggcgggcggctaagtcgctgtcgcccgtggccgccccgccgctacgcgcccttgcatccagctcccttgcctgcgcctcgagttcagcggcccgctggttcagtgcggccctctcggcgcgggcactttccagattacgacgcgcttgttcctcttgcgcagcctcgcggagggacgcgctctccaccagcctttgcgctgcggcctcggcctcctcgagggctcgctcccgctcggtgagcgcatcctcgcgaaggcggagtgcggactcttcttcggcacaggcggcttcgtgcgccgccagtgtgacctcccgaatggcaacggcggcctcgcggtccgccaggtccctctccacgacgcaggcacgctcttccagcgccatggcacgggcctcaagggcttcttcgcgccgccgggatgccacctcggtctccgccgcccgccgttctcaggcagcggcagcgtcaaggaccccccgggcggcgtcgagcttcttccctagctccgcctcccagctcccgtattgaaggcggaggttgtcctacgcctcgttcatcatggtagtggcgatgagggcatccccccgctcctcctccacctccctggcgatctcccccagcaccttccgacgggcttcgagctctgaggcgtgccggcggtgtgccttgcggcacacctccaccatggcctccactgagcgtcgcccctcctcgacacgcgcccatgcggcgtcgagctccgcccgttctgcttgcagggcctccatctgggcacttaacccgtccaacaccgtggtgtttgcgacggccaaggcctgcagaaggggctctgcgctcagtggggcagcggaaggcgtggggaagagtcgcctcggtgaggatgctgcgcggctctgcccgccgatggacgtgccggactcggggatgtcccccggacctggcttgtcctgagcgtcgcccgagggagtgggcccaagcgatgcgcccgcggcctcgtcgcgagctgcctcggaagtcgtcgtcgcctcggcctggcgaagtctggcctcctcccgagcggcttcttcagcttggcgagctcggacggccacctgggcagcttcctcggcttcccgaaggcgatccgcggcttcttgccggtcagtttcgcgggttgcctgggaggatgttgtcacctcggcctggcggagtctggcctcctcccgagcggcttcctcagcctggcgaggccgggcggcctcctcggcttcccgtaggcgatccgcggcttctcgccggtcagattcccgcctccgagcctccgtggtcgccgcattctcggcctcagattgggcggacttggattggcaagaaggacgcgatgggatctcgctgaagcagaagaaaagccagaagacaaacaagatgggtgaatgaaaactcgcgttgggagaatgaatacagccacaatggtcgtgggacgaacctgcgagggggtcggttaaacgaccaccttggaggggaaataaggtttccccgggatggttctgtcccccccatcttgcggagccgtttcttcttccgctccccctcgggctgcggcgtcggcgcggccccctccgggcgcctgctgctgacacgcgccgccccgccccctcggggaggagatggggaggaggtaccctcttgcttcctcttccctcaggcgtcggcagggcggctgccccccgagcccccatcacggggcccggaagcacgaccccctcctggggtagattgatctcccttgcgactcccgctcgcaccatcatggcccttaggagctcgctcctctgaggccccgaccgccgtcatgatggtcaggatgttggcgcgatctggatcgctgcagaggggaaggactccttgggggatgagggatgcctccatagagctgagattcagcacccgttggatcattaccttgaagtcttcagggacccagtcccatttgacctcccggtgggtcctcatacagtcctcggacccggtgtactaacaggcgccccgggcgcgccgctggagtggcgcgatccggcgacgaaggtagtcgccatacaccatggcccctgtgagcccctgggatcgcaggcccgccaggcggtcgaggacggcgtcgtagccatctcccagatctaccggcgcctgccagttggaggcctgcgctgggggctggctcggaagtcggaggcgcgcttcgtcggcgaggggggtgtagaaccagtcgctcttccagtcatcccacttcttgcggaggacgcagggaatgtagcggtttagcaccggcccccgcggctggaagtagcagccaccaaccaccgacggcggtgacaccggctgtacggtgaagaaccaccggaacagccgaagagatgggcgcaccccgatgaacatctcgcacaggtgtgcgaagatggccaatgtcattaccgcgttgggggtgaggtgcgccatctggagatcgtaaaactccagaacatccatgaagaaagaagaaaatggcggaaccagccctgccattgcaaaagggaggaagaagacggaccgccccgggtagcgtggcgccgggcatccctcgcccagcgtgactatctcccggccggtggcagattccggcatgaagcggcgcggcagcccggcctgcctctcgctcacgatgcgggaaggtggcagcacgctaccatcgagcggagcggagccccgtgccatgacgccggaagaagagatgtttgagagcgagcgcgtgtggcgagggtagggcacaggaaacaaggagttagggcgcaagcggcgaagacaaggggaataatggcgagaggaaggaagcaaatctcttcctcggtgtctttatacccttgccaacgctgtgcccggctcctcgcttctcgcgcccactatctcgctccctcgtttctcgcgcccacgcttccactaatcccattcgcccgcttgcggcgcatgaggtggatatgcggctgtggcagtcgagatggaacatatcgtgcgcgcgttaattacgctcgccgaccgaagcgccatcgccatatctccaggcaaaacgaaccggctcgtcccgattcgcgtgctactcgagtaatgtggcagtcttgaagagaccgctcattattgacagccgagttaccattgccgatgtgtttgatttgcgaccgttgggtttctgcccaactgtagagaccagccccacttgtcaccaggcctaagtaagtggcgtcacgcccgaccgcttccctcgaggagggcgatcgccctggcataacgccgggggctactgtcggtgacatgggaccgggagtatcatgactagaggcttgggcaggagcaatcacccacgtggcctgaccccctcgggggggggggggtcgggcccgagggtgatgtggccgcccccctctttgtctccccgaggggtcggaccgcttccgtttcggccccgagggctgaggcgccccgaccccttgtggattttgcgccgcgtgtatgggttaggtgagcacagcggggctcacctaaccgcatttattgcggtttggacgagcgcgtcacgccgcatgtaacgcagtgcagcgcgctcgtttatccggtctgtgactggtcacagaccgatcagatcgtgggttaggtggcgacaggcggtctgacgcacgcctcgccccatcccgtcaggatgagaacctccaagcactcgtccctagccggagctggcgtgttagctcctggagatggcacgtaggtcccggtcagatatatgtcaggcttcatcccaaccattacaagcaagatattgtatgaagaagggcgaacatgcagattgctagactgacacgtggtggacaagaatgaccgatttgtgaccggtctgacactggtcatgtcgtcggcagacaaccatgtacccacgttgcacctgcttccggcggagtggaggtaggtatgggccatcccatcagaaggtcattcggacagcagccattgcaagtctccgcccatttatgaagagatgacagggtgatccccgaggtcagacgagtgaggacgcgtggccacactaaaaaacaagcagtgtttttagctttctagaaaaggcaagccaagtttgagtaaagatagaataaagtccccacacaaaagaaagataagtagaggtggtgcatgtggtatccccttgagatataaaaggaggaccttgcccactgggggacgaggagagaaaaaggaggggagaaaaaagaggggaggactaaaagaaagagaaaggggagaagatctggagagtagatcccacgagaggaaaaaagggagaagagggtttctagagtaagagctctcgggttctccagctctttgtagcttcttcatacacagatccaccagaacacaggagtagggtattacgcttctcagcggcccgaacctgtatacatcgcccgtgtcttgtgctttttccattctcgcgaactttccacagactaggagcttagaacctcacccagagcccccggccgaaccggcaaagggggacctgcgcggtctcccggtgaggagccccacgctccgtcactccctaactgtatttttagactgatgtctcattttactactactattttcaaatagatcatatatgacgttttaaattatgtgtagtcagcgaacttagctgagctaatatttaaagtccattatggtggaatatatctatccaaatttaagttttaaacttcacacaagtgctcgtattatacggctaattatttttccaatggcatatgatgtacttgtcaacagcaagatatctatggtgacttcgtcaatcttgagatatattgcctagtcttccaaagttctcatatagataaggtgtgcgtgtatgagtttgagcatcaaagtctgtaatgtgtttcgaaaaaagtatgtatatatagtcccttcgtcacatctcaagatcatatatcactgatatagttggccataaggcccgaggcccgaaggcccggcccacggcacgcctttttggcccggcccaagcacggcacggcccgacttgggtcgggcccgtgctggcccggcccgaccgtcgggccgtgcctgggcctccccaccggcacgctgggctggcccggcacggtcgggccggcccggcacgatgggccggcaggccaggcccggtacataaagtatggggactaaaaatagacatataaatgtaactgtctaaagaatagggaccttaaatagacttattttagctatttatataccccagcccaaagaagagggaggtaaaatagactttttgtagctgtacatatgtcacagcccaataggagggaggaaatttagacttattctgaggaaaagcacgacggcccatcgtgccttcgggccggcccggcacggcccgaggcgtgttgggccgtgcctgggccgtgagtgcggcacgtgggctggcacggcacggcccggtgcgtcggtcgggccgtgccggcccgacaagcctcggcccaggcacggccgggcctgggccgtgccgtgccgggcggcccacatggccaactataatcactgatgtactatttgcgtgtttgagaggaggggtaaagaagagattaagaagatacgtaaaacgatgtgagctattagcgtatgattaattgagtattaattattttaaatttaaaaatatattaatatgatttttaaaaaactttcatatacatttttttgcaaaagaaaacttacttttagcagttcgggaaatgtgcgcgaggagaaaaacataaagcttaggacacagcccgctagaacctgacatatcttggtgctagaaaagaaaatcagaaaaagcagtgcacgtagacaatgaaccctatgctttcgtgcaaaattctttagaaacttgaagttcatgcacggtactcatacttaattgaaatatgcaagtaagattttcaaccagatttctgtattttgtagtaaaaaaaggctaatattggcacaaattgtacaaaaaaaaaactgaatgggttttcactaaatctgaatatcttttataactacaaacaaattgaacaggtttttttgaaaaacaaattgaaaccttgttttcagctatatccatttgatgtgtcacacgactagctcacactagctatatccttaaaagataaattttatgtttttttttcataaagtacctatagatactacaattttatgctaaaagttatggtacatattccaacgtatttcgagatattttaaggtactaagttttatattacaaagtttgatgcctctcctagtatcttgagctcaaggataattaaattatcctcccttagaatcaattctccttcctcacccttctcttatgtcacgacgcacgacaagaacgctataaaatctactcgtagttatttatggtaaatgtgaaatgaatttaaaatcattgtggtaaaacctgtccacctagactcgagattgcgatgctatatatgacccacctgtccacctgtcaagtgtcaactatatacgacccacgctgatgctcgagctcgcaataaatacaaaatctgtaggagtaaattaaagatatatcccctcgctccctcgtttaattacgtcatgataaacacgctctatccaggcctccgtgaaactaattaaactgtaaccacagaagaaattaagtacagaactaatacaaccgggccggttggctatagccttgatggatgatccagaacccgatggatcgatggatggacggatggcatcaatcattgatggtgttgccgccggcgtcgccgtcagcgaggaggaaatatggagaattcgatcgctcgcctcccgtccccgggtagctttcaggccaccaccaccaatccatcaatcaccgccacagccggggggcattttatgctgctgctgctggcaaacaagtggtggaggatgtggggtatacgtacgtactcaccattggagccaaacgaaagctacctgcactaggctgcactaggtacgaatgtacgcatctctcactctggctactacaatctccccttttttttttttttgacaaattgatccttctcaaaaacttattttgaaactagtccttgcaaaaaacttcaaccaaaaatagaccgtcgactcagcgccaaggacattggcgctgatctataacgtctcagcgccaacattattggcgctaagtcctaatccgaggtggaatggatttgctgagtcatcatagctcagcgccaaataggttggcgctgaggtcttgacgatctaaatcaatgtgaaggcaacctttttcaatgagacacctatagcacaagggaaaagtacacgcaaggtccctcaacttgtcatcgagatacaaaatcgtcactaaaccgcaaaaccggacatccggcatcccccaacttacaaaaccggtcataaaaggtccctcggcggttttcaccccggttttgtcccacgtggtggctgactcagcgtgggacccacgtgggccccacatgtcatggagaccacgtcagcctcctctctctcttctctttcccttcctctcccttcctcatctctctctctcacttatctgcaaagctagccggggcgagcaggagaggaggagggcggcaccacgacggcgacagcggcggcggcggccgtagtggggaagcacggcggaggcgcggggagcccggaaccctgccgacgacggcgagcctgtagcccttgagcccgacgaactttgctacctgggcgccgatgccgtactcgcgggagtcgacagcgaggccgagctcgacgttggcctggacggtgtcatggccgtcgtccaggaggttgtaggtgcggtggccatgcgaccaggggagcaaggtgtcggcggcgacaacgcgggagcaggggagcaaggcggcggcgacgggcgcggccttgacctcgccacggtgcgcagcctcaacggcgtccgcgtggccgacaagatcctgcggcttgtccctgacgccgccgcgttccacaccacgctgcggtgcgtgaaggaatcgacaagctgctcagaggattcgacggcgccgcgccgtcgcatcatccgtcgtcgtcttgcagccagcaaggagccgcggcggcagcgggagcgggaggccgtctccgccgcggccgcctcgacgccgaggatctccgggcggcgcggccgacggggaaggagcggcggagaggagatcgaccggccggctccccacccggcgaacgcgagcgcgagtgtgaggttcatgctgggcggtgacgcgacggcggagacacgggacaacaagctcggcggcggcaggtgagcgcggctgcggatggggagcggcggcgccgacgactccacgccgctcggcctcatcgtcgtcggcggctccgggcgcgagcggaggtctcctctgataggcgatggcggccacggtcaccgcgccactgtacgcggcgggggcgtcgcaccgcctgcttctcgtcgctcgtccgccatcaccgaccgcacgagggggacgaggaggccggcgagctcgcggcgccctgagcccgcgcgccgccaccggggagttgccgtcgccggccgcaccaccctccggccgcgcgcgccgccgcctgtgcgagagcagagagcgagaggaaggaaggagagagagagaggagaaaaagagagagggtgctgacatggtctccatgacctgtggggcccacgtgggtcccacgctgagtcagccgccacgtgggacaaaaccggggtcaaaaccgccgagggaccttctgtgaccggttttgtaagttgggggacgctggatgtccggttttgcggttcggggacgattttgtatctcgctgacaagttgagggaccttgcgtgtacttttcccatagcacaatggtagcaagctgcagctatagccccatgggccagggttcgaatccaatctctcccaattttttttcctttttcagtttcccctttctcttttatctatctttatctatattttttcccatttctcttttttctctctttatttatttatatgttatttttcttttcggttctcttgttttcttttctctctctttatctatatttttccttttctgtttgtctcgtaatattatcttcaaaagatatgctttatttgcaactattttttgaatttggaaaaaatattaaagtggtatattatatggcaaatgggaacttaaactgaaatttcaaatcaaatttaaaataaaacaaattatagaaatttgaaggagcatatacatctttcatattggcactcaaaatcaaattcaaaataaaacaaatatacaaacgaaaattgaaagttaagctttcaaatttgcgatgtaaattaaaaattaaaataaatttataagtagaacattttaatttgaagagaaaaatactctcctaataatctaaatattatataatataagttttcaaatctacgatgtaaattgaaaattaaaataaatttataagtagaacattttaattagaagagaatggtaggaaagtatgctaggaggaagagaaaagggaaaaaaaagaagggataagtaggattcgagcctagcacctcagggttaacaggtgaagacttcaaccactaagctatcacagttttgttgcaatgtaatgcttgcgcaactatttaatcttatttggacctcagcgccaaatagcttggcactgagctatgatgacagcaaattcatgccacctcggattagagctcagcgccaatgctattggcgctaggaagttatatctcagcgccaaggtccatggcgctaagtccacggcctatttttggttgaagtttttttgtagggactagtttcaaaataagtttttgaaaagttcaatttgtcaaaaaaagggtacaatctctctcctgaattttttttccgatgaaatataatctctcctgcgatcttatcatctatttcgcctgtaccaaaactaaatcaactttggctgtgcacagagatttgtgtgtatgatgtagatttattttggaacggtgtaacccaaataaaactaaggctatgcccagatttgcgtacataaatcgatttattttgggatggtgcgagtagctagtagctagccccgtatttatggatgaaaatagcttgaatacggactgcatttaccatattcttttctatatattttttggactagaaaacaaaaaatggaaatgaatatacctcagttacaaaaatgataaaacatattattgaatataaatacgaatcatatatgaggtggaacaaaatgatcataaacacatccactactaggccctatgtcgctcctacagggtaactatattatggcatgcagacactcatcccatgtcaccactgtccacatccttgctttcccctcggcgccacctgagccggcctctgggaaccacgcggttgcgaagatggtggtggcggggcctctgaaaatctctgtattttcattgcgttggtcttggagcaactggcaagcggcgggagtggaaccgaccaggctggtcaggttcaagagaggggccggtggcggcccgatgacgaccatatctagagcgtgcacatggctatggcgatactgatggagcttgcatctacatccatgcgagctttgctcggtgtgctggtgtccttgttgtgtcagtgtcctcagggtaccgatggtggcagctacagcgagttcttgtcggcattggctagcggcgacatcgggaaataccatatgtcgtgttatggtggctggatccggcgccatcacgtcaagatcccatcggtagcgcagctcctcacccacagcgtaggcatgggatactgaggagacagcgagcaggtttgcatctagaccctaacggcagctgctccatctccaggggcatcagtgtaacacagagcggagataacttgtactccctccgtttcattctatttgacacagttgactttttattttatgtttgaccgttcgtcttattcaaaaacttttgtgaaatatgtaaaactatacgtatgcataaaagtatatttaataatgaatcaaatgataggaaaagaattaataattatttaaattttttgaataagacgagcggtcaaatatgtgctaaaaagtcaatggtgtcaaataaaacgaaacggagggagtaggtggttaggctgcctgcatctaaagctctaccaggcaatggcatgtgtggatagggttaggcggccagaaccgtggtgccctacgaagaaccctccccccctcctaaattatagccggctctagcaagaggccctcagctgcgctcaatggcagctttgtactggcgggcgctctcaacagagtgggtaaggtgtgtgctggctctgtcggcatccagcgcatcataagggataggcacatgggagactcaggcagcaagcctcaggcaagagtgacatgggtgacaggccgtcgaaggaaccaagaaacaattaatgatgcacccaagcacattgtgaagatacctatccgcaaagatgatcaaggcaggtcaaagcactcggctgtggtaattgaacctctacgcgatgatcatgataatagagaaaaatctacacagctcgacaaggctccaccaccagaaccttccaagagcttgctcatagaggaaactcctctatccgggccagatccaacaacttcttactggcaagcaagagcccctccgatggtggtctataacaagtttccttcgtcaccgtctatgggctcttcagaggctgtacaggttgacgatctaagcgacttctctccagaaaccaaagaggtacttgtgcttctccttatttttcttcctttatctattattatgctttccgtttctcttcttttttttttacaccgctattcttcttgcattaatccaaaggtttgataacttatcgcttgaagacatacccctgactcaagatatgatagatcatggtattgcatgcatcgttttgttttgttctatttttttcacatggatggataccaatgcactcaacatctcttgtcatgtggagaaacttcaggagaagaactctgattatatcaccaagtttgtagcacgcagcactaaccttcagctcagttctgtgtacctaatacctgatgagccactagcactgaagctcccgaagtccacacctgtcgacggtcgaaatgccaggatggtgcaaggggatttagtcgagatccaggattgcctgagaaggaagcagttcgataaggatactatcgagctgatcaagacggctgatgccgggagggctaaaatctataagcctccactccccgcggacatggcgatattgatgtctcatctagaagctcttgtgctgcgcttgaaaggagatcttcctaaaacttttgaagaaaagactttggccactcaggatggtgaagcacattcctatttggcaaagctagagggtgattgttaagatgtgttgtccgatctctacatcatcaagagtggccgcccatagctgcaagtcttcaagaggtcagtcatcaggagcctcttggaagaaaaaggcaaaagagcatgagctgaaggtgaaagaggcacgagagagagaataaaagtgcgtcgagtaccaatttatttaggatagaaaaaagtctaggatatctctatttagagagatgtgtgtgtgcgggcgtgccagtatacctagatacacaaaatataaacaacacaaaagaacacataaacatgtgatctttattgtaggtgttttgtgtgtatccattacagtgatgtcctcatcatcggccaaaagtcaagcccatggcagggatgtccctcaggcatcatctccctccctagaggcaccatcttttgcatgacatgttcctctctactttgaagctctaggtgaaaaccccatccagtatgcaatggcagtgtcattagacgtcacttcccttcttgaaatcatcatcactctaccgacaatcatggttgtcccccagtgcccagactttttgtgtccttccctccctcgtcctgctccccacaattccaaccttgaggcaagtctcatctttgactcctccaacaccagtccacaaattaaatcccttgctttattcccctatttgtcaaaatggtgccaacgccaacgtgcctctaaagccggagttaatcagccaatgttcttagcctttgcttcaatcaccattgccttgacccatcatataccacgagtatggtgttgccttgtctccctctctaaacttgcacttttggcatgctagttgatccataacgtgggtttgcaagttggttggaagcctagcccttttcggtggctattgcgatttgtaaactatgtttctctaatgtcgttgttgatgtttcctctcccattgcgactgtcgcctcttgccatttcaatttagtcatgctcctagtttcatcttcatcctcttcgcttggtggccttggccacaacgttcaacggttctcctcctaagggtctttcttcccaaaagggcattggagggtgttgaattggctaatagtttgttaaaaaatgattaaatatgacttgatgtggacggccaatggtcgcaacattcagtggacctccctcctctggggcttccttccctcaaagggtgtcggtgaccattgatctagataccaacagggttatgttggctgtgatgacttttatgcaggtggccttaggaaaccacaatccccgatcaccggaaaacgggccgacttgtgtttggcaaaaggccctttagcaatcttctattctatgtgcttcatggctgtgtgtgaagtggatgctgttaaactagggagctagctttagttgtttgggagtttagatacatgttcgataggtggacaacatcacactcctctttttttttctctttcttttatttcaggtgtaacctcttgtgttctcctccagggaacctacacttatatagctgaagcctatcatgtgaaaaactgttggaagcaatatatatataggcgggcattttgcactagaaaaaaaatacaaccatacatatttatcagattgtaaaaaatctttatgatgggctatcaaaatcaacatagaactataacttgtcctttcatatcgaatagatcaaattctttaattcattgtggtcatggctagtcaagggcatgcacttcggtgaatcaatcctcccttagctatctctatctccaaccgacccattaaaacaagagggttgcaaggtcactttggtggcaggctcgaggcaggcctacgcaacactgtagggaagaagaaacaggagacaaacgacattaaagcaactacagtgtaaccaaagatgtatgtttacaatgctttgtttggggcccctacagtgtttaggtagacgtatggggtatataagttggcaagggctcaccgagagaggggttggactcaacttgacacgacagaacgcacggaacctctaggagctctagactttccccagtctaaaacatccattccaatcaagaaagcaggagtaaggctattatcctttgggaagcatgagccttagtaaatcatgtatgtttgttagtttgttcggtgctaaagccatgcaatataaccttaaaactccatcaccaaacatttggttccttggatcttggtctggaacaagacactagcctcctcgtttctcttcccttccttaacctttgctccaagtccataagcccaagcgcctgcgaggtgccccgccccaccttatccccatcttcagtggctccctcatcgtcaaagacaccaccagccgcccctgcccccgccccgtcccgcctcctaagcactacggatcccacacccccactgcttgtccaccgtccttcaaccccgtggctttggcgccgctgcccacccatatcagccatcgacgaccagtcctctgtctatccaaccatcactctaagctatggaaacccctcctctttgccatcccctgactcccatctcaaaaccctaacccctaatctagtgacgccatcaccaccactgggttgtcaccagtgaaggtcccactgccatcgaatcttagcttgattttaggtgactaaaatctttaccatttccattgataatattctattacaaaagatagtaaaacctatgtgttggaatccaaacatacatgtaggatgtctcctgctagaccgggcatgcctgacatatgtaggactcatttttattgtgcatgaacattatctaacggctagacactttgatccaactccaacggctaacatagcttaatacgaggactcgtttaataatgttccctcatatcaacctagcacctgttcagatttgtaatactatattatcgtatcttataatatatgtgatgttatattttaagatgaagagagtatatactaattggaatgcatactccaaaaataaactaacatccacatcaaacctagacttcaaaccctattatggtaggtgcatagccagggcttatttatatgtagagatagcaaatactagtatatatggacagacaacttttgcagagaacgaacaaaacgacgaggtgtagtactatagactcaagtacaagcaagagcaggagatagaggattgagtacatttagctttgtctcgttttcttggcagtttgtctcttcctgaaacagcaagcacgcctatataatagcctttagatgtcgagaggcgatcgatctcggctgcagatgctgaaaatcgagctgaatgactagtcccgagccgttgcagccacatttcccactacggtcttgataaacagattaaattgcctcgtcagatcgttagaaaaaaaattaatttaaattctggtgaattatttaagataaggaaaataaattacgtacatcctgagcctatgtaggatgcacacaactaaaatatattatcaatttattatgtaaaccacttatatcagttgtaaaagaagctagccaactaatttactttaacgatatactttttttgtcgaggtggcagatagtaaattaaatactgccgcaaaatatcaccttttctatcggacatatcatcgtaaagtcacgatgttttgtcgatatatgacaataatgttactttgccatgaataagttcagtttgatatcaggatctaatatgcatgctcgatctttttgtgaaacttttacatgctttatcatctatccttttggccatatactcacaaaagtgttaaaaatatttttcaaaaaaatgttaaatgtgcgtttatgataatctattattaacttttttttcaaatcaaatataatctcttcgtcctacaatataagatattttaggtggatatgacacattctgtacagcgaatctcgtgcgaaaagatgtgaattattcgtttttttttcttttagcgcgcgtgccccagagctagcgatcgagcacgcgatacgtacgatgccacgatggatcgatgcggacggatggatcgatgggcagagcagcactaatcctttgttgcggatagctttgcgggaacgcaacgtggagtagtctcaaatcaacgtacgtgtcgccccagcaaccaagatagtaccactactactccatttgtgtgctgtggctttcgctcgcgcggccggccgggtatcgcctttcgcctaattcaatgccctccatcgacagctgcacctgtcctctctctctctctctctcactccctcaccctctctcagccaataatcgatattatttactcggatatactccctccgtctcacagtatatcagtatatgttattttagcatttcccacattcatgttgatgttaatgaatctagacatatagcattttctacatttatattgatgttaatgaatctagacatatatacattaacatcaatataaatgtgggaaatgctataatgacttacgttgtgaagcggaggaagtatattttatttgctacaacataaaatgcttttcccagacggacaaaatcgctttttcggacagacgaaacggccatctatctggtatatgtaaaaataccgattattgcaggcgggtatcgcaacagaatggaaaaacttattttcgcccacggaaaacgcccacctgcacaagaattttggtgaaaataaaaatattttttaagcaaattacaaaaagcctagccccaatcccctaaccatattcatagctaccccaccacctccgctaccgccgtccaaagccggctgccgctcgaagccagcggatccatctgctccaatggccggcggcggtagcaatggtaaagctatgtttagtttgctaaaataacaaaaatttagtaatgctaaaacttgataaggttgaatgtgacaataaagtttatatgcccttaaacaagatatttttgtgcatccacaatccgttggatcattacctctggcttaccagcactatagccatccacagttcattaggcattgacaccatagtaactatcagctagtttgattttttatgttattatattattttctaaatataattgaatttaaaaataatttttaaaaaatcaaagcgacctataatacgatctggagggagtaagaggtaatccaaatttaatggattgaaatttgttttttcctcgctcctttacgtcaggtcgtcagttgcatgtgcttgtttttctattggattttcgtgagatgagactctgttcattcattcatgagtcatgagtcatgaccataccctgcataactcagcgcattcttttctcacgtggtactaggaccatgtgtgcatagttgctactggcctgccatctgtccaatgtacacaaacctacatcttttcccttttcctacaaaagataatgccagcagcaatattacttcatttatcatctatttcttaaaaaaaaaattgcttcagctttacacaatatatgtatagtgcagggcaatttgtctttctctaatgcataacatagagtaattcctgtcatgacagttgcttgcttcttgtaaaaagtttttcatccttttttttttgaaaactacaacacatgaacagtcatctaaaaaaaggaattacacaaagatctgtttatctttgaactttcacattttcagataaaaacaggacttgtcttaaaaaaagttttgtcattttttttctgaaaacaacagcacatgaaaaaaaggaaatcacacaagataagtttatcttttaactttcacatttttaagataaaaacagagtggtctgaaaaggctatcctcccctgcattcatgctccttttttttctctcatcacatcatctgagcacacgtacacaactgcacaactgcagttgcacactggaagcaacaagacaacgcacgcacgcatacattcccaggcacttttgactgaatcccctatgatttgtgcacacgcagacaaacaaaatctcatcctgaactagtgaagcaggccaaaagaaacgctaagaaaacacaaaaagcaagcaacgatcgacctccatcccctaccactaccaccaccggcagcacctgtccctacaaaaattgagagccaccttcttcccattattgtacgcccccaaattgaatctttcatctgcaatattatcatgtgatcgacgtgaattttcgacacattcaaccatagtactttcacgtaatgtggatgtaaatggctgtccccaatcgacatgacatgaaaaacatggataaatccttttatcaaatgggataatagcattggaggcaccatgtcatcccgttcggatgagttgataccatataggaaatagctaatacccatcagtatcagacccgatactccctaggtactagctcgatgacgccctaagtcgtcttcacctcgttggctcctcgcaacacgtgtagagcgtgcgctaaggctctgcctcatgccctcatgcatcccatacatacccctccgacactagtggcctgtttaattggatggttgcctcctcttgccgcacttcaagttaggcgtgccacaggtaggtagcccactgtttgtttacttactgcacttgaggcggccgcataaaattcaatagcagtgaactactctgccgcatatttcttcgttgaatgtttggtgctcaaatcgtccgccacacttatggcatggccgtacttgtggcttggtaagttgaagtaaacaaccaaacaggccatagctcctcgcaccacgtacagagcgtgccctaaagctccgaatgtcctcctccactaagtcgtatttcctatagctcctacagcaacaaggtcacttcctttgttgccgtcccggtgttaagagtccatcattgtgatttgtgagggatacgcctgtggtggtctagctccacatagctaggctctctctgcacgcatgtatacatgagctttattacaaaatttaaacatttttcctcatacaatctaattataccatcgcagttaaagtttaaagtttaaacttcaaaatatttaaactttaaacttttcacattcacaatctaattataccgtcgtaattaaatctttataacaagtttcatataattatattatgatgaaagaaaaatgtatctttaaaccagaacagttccaattagaatttaactctgttacatattttatgttctgattttactttatatgtttttgttattggggctcaatgtttcatatagtaggttgttggtgttgcattcagtatttttcatcctaaaatacaataacttctaacgttcaaaatttatcctaaaatataataatttctgcacctacattccattctcaacgaatcacagccattcaaattctacatctggtttttctactcaacaaatcaaaacatgttcccatttaattacacacctacattttaaatacccatgtttatgcctaaaatttcttatattttggggctgatgcagtaatcaatacgtatttttaaatgatctatcttttttaaatatctgattaagttagttaaaacatttgataaaatatttttctccaaagcgataaaataccgctcgacatttttttcctttcagatcggacgtttgatttgcagtcgcgacctaaatgtttaccataacaatttgacacgtaataataagaagacattcccgagtttttcaaaacaaaaagaattaaaaacatcgccagaaacaattgtggcatatccaagactgacacgtcatattttttttccttttctctttatatgttgagatgaacacgttcgatcggctcttgatgctgtacccaagtgtccattatcaggcaaagctttaaatcctaaatatgacacgtcgttttccgaatccgacgggtcagcaaatgcacggctgctacctagacccgtacccgctaagcctccccctttatcggatccgggtgatctcgcgcccataaattggcccctcctcggctcctcgcctcgctgccattctcttctcctcctcgaaaagaatttcgaagcttagccgaagatgccaatggagaggtcggtgtcgtgcgccgagaggccaccggcggcgttcggcggcggcgcggccgcggacctgcggtgctacagcgcgtcgtacgccacgtcgtacaagccgggcgctggcgcggcagcgggggcggcggcgggggcggggacgaacacgacgacgaaggtgatgaagcgcgccacgagcgccaacgcgtggtcgcggccgggcggcggtggcggcgtgcagcggagcgggagcaccaagacggtggcgtcctccgccgccgggtggggccgcggcggcggcgggccgacgcccgggttcaacctgcggagctacagcgcgtcgtacgccgcgtcgtactcgccgttcgaggacccgagtccggcggagaagaccggcggcgggggcggtggcgcggcgacgtgggcgtcgtcggcggggcggcggtcggtgaacctgagagggtacacgccgtcgttcgcggcattggacgacaccgccgtggcgccgccgatcccggccaagaagcaggtgtcgccgacgggcagcttcgccggcgccgtcgtcgacgacgccgagctccagcggcggaagcggctggtcgcctacaaggcgtacgacgtggaagggaaggtgaaggactcggtgcgccgcagcgtcaagtggatcaagggcaagtgctcccgcgccgtcgacggcaagtggtgatctctccctctcaccctctctctcgccatcgccatcgccatggctcgagctcgagctcgagctagctcctcttcgtcgtcatctttcttgctcttgggtgtgtttgagtcaccgttgattgctaccttcctcctacctgcactgcacaccttcattcgatttgttactccttcttgttttcttcttggatattaggattttaattttgacgagatttggtctgcatatagctactgcagccatgtagttactactactacttagtataattcagtatgaggagatacatatgagcagtggtaagcttttgccttggtgttttgctgcagagcaaaaaatccaaggaaaagttgatcagtgtgtggtgtgcttgttgttgtacatacttgtatgagtattattatatctctgtacccagtttactgtagtagaataagattttggaggtgtgagatgtaaataaaatacatatatactacacatatatattacttgagcttcttcttcttctgtttgtattactgtctgcatgtaaatactatgaactgtgcaagaagagctgtccaattattgaggtgaggtgagaaaagagggaaattttttgcagcatttcactgtgcagcacagcagaattggttacttctcttctttctacttcttcttgaaaggattgaggatggtaagctgagctaccagtgttactgaaaaggcggacaaagcttcagaaacggatggggcctcggcgcccactcatgcaggattctctatggatggatgctcctgcaaacgaatttgttattaccttttttttcctaattttctcccagcaattcagaattttcagattgggtagtgcaggctgcacataattattccccctttttcttgttctgttttgatggaaaagatggatgtggagtgattctgttcctactaactggattgaattctggggagaaaacatgtggatacttgtaagtgtagtgctgctctactttggggttgtggactctgtttttttcactccttgtcctcactactcattcgtttatttttataaaataaattaaaattttgtaagtttgatcaaagtttttttaagttctaagaaagggggttctgggatccgattgcataaaaactcatgcctctaccgaaatggacgaaattcggaaatttgaatcaaattcagacaaaatgggagttaaatgttgtctctaacctcaccaaaatggatcaaattcaccgaattacagacctttcagtccgaatcctagaaccttgctggcaacatctgatagatgaattagaaattcgcggatctgaaagcatccagctaaacaaagtagcaatcactcaccattatatctttgcatgtagagtgcatgttttatcgtcattgagaagataccacatatttaaagttttccttatcaagcagtgctaaatgcgatgttcggagtcgtgtaaaggttctcattatactattggcttccctagatttttttttacagagggggagagaaaaaaatctgacagcgtcttccctgccgctttcctagcgttcgcgtggttcaactcaagtccatacgaaaaactgaaaaacgtttccattcgatcgctcagtggtaatttcttatgctaatatctggtttgcttgcagcaacggacgaacgcgacggataaaaatgctcaattcgtcggtgagctctagatctctttacccctaccggaaagggattgctcatgtcgttttcttgatccccgtctgattccacagagaaatgcatgctcctcctagatcttgcctctactgatttttcaatcttgcattgagctttttgctgaatttctttaacaagattgtttctacatgggaaaagtttggtatgacgtttgcctcggacgtgagctgagtctccatctgctgtgaccgaccatatatgtaggtcatggtagctcgttgaagatcataacaacttcaagaagaagaagagaagaagaacaagaatgttatctgcttttctgaatttttcagacttctgatcttctgaaattctgaattcagaatgtatctgcactcttttgaagtgatcgagcaaacacacgtccctttctttgagagaacccaactggcatcccatttgtctgtagcttcagtttcatggcattttttttcctcctaggtgatagcaataggatttgcattggattagggcgagatgttgcagcagctgcggttttggattacctttgatgaacagtttctggcggcgaattcgaatccatggttttgcagcttcagactttcagttaacagtaatcacacgtcctttcatcagcttggtggatgcttctacttagtacaatggattcttcccaaatctttgtctccttttttattctgaaaaagaaaaactattgtttatattgacaaacatgttgataattgtactttgtgtggctaacttttacgatgaagacaacaggtgaacagcattttgcgacatcaagatatgatcgtatggagcaatgaaagttacttaacgttgacgcagaagacttgtgaaaactttttgctctgaaaaagggtaataaaaaggggacatggcttgttctttttactgtttgtgatagtttcagtccattatatcagggtagccagttaatttctacccagttgatgtactatgttcttgtttagtttctatcttgttgtgaagaaatcctgtagcatgaaatggagattagaagacccaatctcctgcacatggctttaattaatccaatcaaagtgaataaaaacacatatttttattcagggtggtatatacattaactattctaaacaagctgataattgctatattcatggtggtagatacattaactattccaaagcaaaaatatggtttgaatagtatcggcttactcaaatttgaattaactgataaaagtcaaacaatattatcaagttagattagctaatgcatatgataaataaagcttgtatcgactgaattagagtgtgttggttccatccgacggaagcactagccccgacgatacaaacgaaatagacggagcttaccttattgctggagatcaaactcaaccaatgcagcccaaataaaaaaaaaaaagaactcgtcgagttgaaaacctagaaaactagggtagcgatgcaccagaagttgtatttttgaactgttgttgtttacaaagaccctgggtgtacatatttatacccatgagtagatactagtcattcttggacatgatacaaacttttctaaagataaagtaaaattataagtccaaactggattcaaacaatctttcctaaaaatataaaaggaaaaaaaactccgcttaattaatagataaattgccacatctaagcccttttgaatctggtctcttctagataatttattttccttaattgactaattttctcaaccgaatctgacaagaactcgacctccggccctgaatcatcattcatcggccatctctataatcatgaacccgatgtcaatggtagccgatgcaatctctgtttcttgacaaccgaaatcacgccgttaattccgcctttgactttctccttaactaacggtgtatgccaacttttacggttaacaatgtgtttgatgagataagtagtaacaactattttgagatggagggagtaaactgcatgtcattaggtgtgagattagagtatcatttatcttttttgtcaaaatagttattgaaaataaaattctaatgttattgatgaacaaattttaaaaaaaaattttgtggatctatattgcggttgcaaaaagtgtttgtgatagtttcagtccattgtatcagggtagccagttaatttctacccagttgatgtactatgttcttgtttagtttttatcttgttgtgaaagaaatcctgtagcatgaaatggagattagaagacccaatcttatgcacatggctttaattaatccaatcaaagtgaataaaaacacataactttttagcctttgtcttgttgctaggcaagtcggcagaagacttatatttttcttaaaaataataaatctttgcatgatgcaaacacacatgtacagttgaaaccactgtttcaggatgcagaagcactgcagtgtgcgtcggcacattcactgatttctactccaaaaacaaatactactaaaaatcattgaaacatccactgattgcatctctgattcttctgcagtgtatcaatcaaaacccatcagtgaatattgtgtgagcctgtcaagatgtgatgcctgcgttgaaattttgcagttaggcgccaatggatgacaagttgcaccatcaagtcctaagggcccccattaattaatcaaatcaatcggcgttcttcttcttgtctttgatataaactgagttgtccatccgaccatccatgatccatctatctactatctcctgtgatatccacatacataggcgattagccatgcctgcgttattcttaatcctatctttcagaagggaaatgctagtgttcagtcaccttcaatctagtactgtaattagggagggatgaggggaggaactcagtggtgatggcgactagctccccggtggtggaagcgatggcaaaggtcatcttctccagcaatggtgtgacggtggtggtgatgttagagtttaaagttttggggtgggggttatgatgggaggagggcctaggggagggtggaagagggggagttctccggggcttagagggatggtcttgggcagcggcgatgggcaggtggggccaccgttgaagctatggggctaaaggagacaatggacatggttgatggtgggggcgagggaggcatggggttcgaagaaggattcgattcgcagcaatgggccgccgtaaatggggaagagggcaagagagagggagagcaaggaggggagcgggaggtgggtaggagggtgggccttgctagatggctttcggctagctggcgaggctattgtcgacgcagccagtcgagaggaggagggtagtgcctgatggatcccgtgcgttgggactagggaggggaaaatgatacgagaggataatgtgtaatgttcgtgtatgaatctcaaggcaatcttggccgtcgaagaaattaagtgattttttccagtagaattagacaatctctattcaaaatttcaagtcctagccatctaaaaaattgactaatattttttccctttttagtttatccgagaattagaccatccacattcaaaattttaaatcctccgccgctgatttccacaacccatgatgtttgtgtatcgtcatacccaactaatgaattatacatggctggaaatgatcctagaatacaattctcggatggaatgattgcaatatataatgtgcagtggtcaatgcgcacctgatacatacatactcacaccttgtcgatcgatcagttgggatgtcaactgaatgagaaaaatgcacgcagctgcactgcagaactagtgtgcagtgctgtgtagccactaaaaagaaaaaaaaatccttgacctacctttacaatcctcctacatatggccgggacctccaatatctctggctgctagcttttgattcgaaatgggagattattggataatgaattggtggttattacaggtttatttgtttgtttgtgtgatcatgcagctatgctgctggtccacgactccatgagttacagtctctgcctgtccctgtatttagggtgcaaagctttgtggatgcactgtttcagggtgaagagaaaaaagcagaagaggatatgtatatgtagcctcttctgtttcaggtggtgaataattcgattcgatttgatttgatttgatttaaaccctccatgactgactgactgacgtacagttacgtagtttgggaattttcagaaatgcgtgtgtaggacctgaatacagttgggccgcaatatggttggcaaagaatggtagtagtagaaccgttttggatgtttgcttccattgtcaagtcatgtgaagtgtattaggtatgagtagacagctatagcacattgagagaacagaattgaagggcactacgacattcagaaatggccaggggtcttccggctagctccataaggtagtgggctagacggcctaggttcgaaacctcacccattctaattatttgatattaagtctcaccccttctaattatttgatattaggtcctttcttaatattcgcatcttttcactacagcattacgtgtgtttactttgtactgaatggatttgtgataattattcgacatacaaaataattagtaaattactatgaagtttaaaaaatgtatctaaaacagtaattatttatagaaagttttcacaaaggacacatcgcttaagaggtcagcaagcgcacgcattcatccattgatctgtccattaaacaaaaaaagagagaaaataacatatttctttctttacgtgagaaaaagagaaaatatatgatttaccatcgacaagcacctaattctatgggtcaacccaccgtggtttgtatgtatcatagaggtgtgtccacctgcttggtatgacctcacgtcaaacggaaagtgataacgcggtagcattttgtagataaaatcgtctggactatggtattttataaaacttacagatcgatgatagaaaaactcgatgatagaaaaatgtagaattaggcatctattaatggcaaaacgtagaaacgtgggatcgttttttctgaaggtgagacagcaagcggcattagcaacagaaggtcaggaggaggttaggttggcgtttgacctgtgtaggcgatcgatcgagcgcgttgagatgttcacttcagaagttgaggtgagaggccaccggtagctggttggttgtacacttgtactggagggatggctagtaatggtggcttaattgaggagggacttgatcgaggccggactcctcccgtcgtgtgttctacttcctctgtttcacaatgtgagtcattctaacattttccacattcatattgatgttaatgaatctagacatatatgtctagattcattaacatcaatatgaatgtgggaaatgctagaataacttatattgtgaaatggagggattataatatacatgttactacctttgtcccaaaatataagggattttagaaggatgagacattttctagtactatgaatctggacatgctccttggtaagatttattgtactaaaaagtgtctcatccatccaaaatccttaatattttgggacggaggaagtaaatgatatatcgtgttttgctattaaatatgtgaatggatatttataagtatttaaaataatggatagatatattaaaatattatgtgaaaatgatgtgaggggtaataattgaatataattattacttgttacatatatacatgtttgcatgtgttctcatacataattataattagatttagtgctgatgatacgatattttacatattgagcattagatttagtgcagaagatatataccccccctttaaaatgtaagagattttgattagatgggatatatcctataataatacgaatatggacagactctttattaatatttatactactagaatgtgttatatcctccatttcaggttataagatgttttaactttgatcaaagtcaaactacttcaagtttaactaaatttatagaaaaatatagtaatatttataatacaaaattagtttcataaaatcaacaattgaatatattttcataataaatttgtcttggattgaaaatattattatttttttctacaaatttagtcaaacttaaaacagaagtcaaaacgtcttacaatgtgaaacggatggagggagtattttagaaccaactagatacggtggggttgaaacgaaaagaaagggatggcacgtgcggttcgatgatgcagtagtgcgagggtgtggagtgggtcgtgtcaagcgcgatgcgataaggttttggttcgtacgtcggtcggtcggtcgttcgttcgcgtccaccaccaacagcatagctagctaccacaaatcaaggcggcgatagatcgatcgagcaatcgatatatgcatgtgtctcgtcgcattgattataattaattaattaattaattccagaatacttacatatgctacataagaatgattttgggaagaaattaaagaaaacattcattccccagatgttaaaggagctaggctgtcctccctctagcttgctaccgaactatcaatcgtatcgtatgtacgccacacgcagatacaaccgatcggcgcgtcagtgcatctcacacttcacacaatccatgtaattataggagcagtgtgttttcacttcccttggcacttggcagtccattttttctcctctttttttccaaggtaatgagccgtttttgactggttgcgttgcgtaattaaaattttgtttcttctaatatggtgacgtgcaatatttttacgcgttcgtgagaaaaaaaatccatgtactgaataaaaatcgctcgtgagtggtaatttcgcggaaacaattaaaaaaaagaaaaacctaatggtacctgaacaatttttttctatcaaaaaataaaatttcgattttattgaaaaaatagactgaaagcagagagatctatgttttctaccgagtctaaaatatcatttatgcaaagtgactggttagcttcttgtggtagaatcatcctatcaaatttaagttctagacacgttctcgtatttacgacctattatttttcttcaatagcaagcgacgcatccaccgataacgagatatccgtggtgacttcgtgaatatcaagatataccgttccagtttatcaaaaatgtttataagggtaggatgtatgtgtatttattgagatgaatatgcacgttgtgagtgactggtttgtatggtgtttaaaaaagaaacatcctggttttcatcggttttataaaaccggatctcaccaagacatgtactgaagcaggctagtagcagcttccgatcgatatgggtttttttttttttctggtttgggctttggtaggaatcagatgatcagacgagtagacgacgacgtaggctggaaacccagcccactcgcgtgtgcaagaggcgcttctttcctctctcgtgcagtgaggcccgcgatgaagcccacttggcggacgggaaatccgggccgtgtggcgttcgaagatgggccggcccagagatctgcctgtcaacggtggttacctcccaaatcttaaaaggcccaaaaaacagtacgcccaactcccaaccgcgaacgtcaaaaaaaaaaaaaaaaacccaaaaagaaagatgctccctcctaagtcccttaatataaaagattttcccatttaaatttgtctcaaatactttattctccacctataaacttttatgctagtttattcccatatttaccaacttttatactccatccgttttttattataagtcgttttgactttttggctaatcaaactattttaagtctgacaaagtttatagaaaaatatgtcaataattttaacacaaaataaacatattatcaaaatatattcagtattacatttagtgaagagtaaagtgtacggacggttcttaaacttttagggatgtgtcatttaggtccctaactctcaaaatgcatatccaagtcccagaacttgtcatagtatatcatctaggtcccaaatcgccacaacctctttaggatcctacgtggcgttgatgtggcatgatacacggacatgacgtggcatcattttgactgacaaatgggacccatttaaaatttttcttttttcttttttcttttttcttctctttgtttccctttcttctcctttgacccgagcataagatcagtaaaaaaaagaatgagaagaaaacgaaaaagaaaaagaaaagaaggaaaaaagtaaggacacgtcatgtccatgtggcatgccatatcagcgccatgtagaatcctagaggggatgtgtcgatttgggatttagatgatacactttgataagttctgggacctggatatgcattttgagagtttagggacctatatgacacaaccttacaagtttaaggaccgccaatacactttactaatttagttaggtagatgttgctagtttttctatgaaacgatttatattatgatggaggggagttgtgttgcctgtgtagtgtgtcattgtcacgcccggaaattcactagtaatttccggacttatttgtgcataaaatcctcgtccaggaatcagccgaggtacacaaactgacaatttaatatacaaattcatcaaattaactaaaacgataaatacttacttatgaggcacttagtcctcatcatgaagaaaactgctgcggaaaataaaatctagcgaagctccggctccactcccacaggcagctcaactggggtataagccaaacgtcttctccttcgcaacttgtcttcaactgaggttgattgattattgcaaggtgagcatatgacatactcagcaagccacacagcaaatatgcaagtgcacaaggataccaaaggatggcataatataagctcatttgcaaaagcagcattttagcaaaacatttaagagaagtaaaacagtggagtaattaatcaaaaattttaatcaacactgaacagcatacccatgctgtacaggcccaaccatcctgaacaaccatacccggctgtacagatctaactccaaaccaggagctaagcaaattattaccagttataacatcaatacttattgtgagaggtgtgggactaatcacgaaaaacattgctcaacccgcccataaccgcgggcacggctattcgaatagttttactctggccagaggtgtaccactgtacccacaagacacagccccacatcatgtcaccatgtgcctcagtaccaccacggtacctcggaaaggggctgtgacagtaccccttgcataacacaatccatcgcagcgcaccattcctggatcataatcaccccctcaaaaaccagaggcatggactccccagcgacccccgtgggcttatctccgccacttctcagtctggtgctccgcaatgaaccatgctatacaaaaggtaaagccgttgcccacgctggcttgtggttggcacgattaatgttccacaatagtagctcgcgaaccggtccttaattgtcatgagcacgactctcaaaaccatgtgctcacaacccaccattatcaagttttagttggcaagtaattaattaaccaatcacgattgaccatcgtgagctaccattaaatataaccataagtgatagtgaaacattagttatcccaattgtgtgctaatgtttctaagcatggctaagcaatcatatctaatatctagctgaaccaatatatatatatagctcaactagtcaagttataatcacccaaggtatcaaggaataaagtaatcaatgcaaacaggccataacaaaggaataggttcacaccacccagtgacattcgaaaataaatgcacagttgaaataaatagagaatttaaatataggatcaacatgctcaaaggattgtgtttaggatctgtgtgacttgccttgcaataatcggtcttcaataaatcttcttgaatacttccggcgcactcgcgaaccttcgcaacgacggaaacgacaagctatcacgcaaaacgaagaaaaagactaataaaaaccaaataaacagtacataaaaagtaaacaaacttgtagattacaattttagatgaattatgagacttgaacggcctcattctgacttcaaatgaatttattatgaattttacaagattaaatctatttaaagcccatttaaaaagaattaaataaatttaattcaatttatggacaattttaatatgtagatctttattttacacaacttttgcaacttgaaccacattaaactgagttcaaataaattagttatgaatttttaaagattaaatcggattaaaacacttttatggattttaattgaattatgacgcaataatgaattatttttgaaaaggaaaagaaggattattgcgtcagcggctagggtttcggtggaccgggcgcacggcaacggttcacaggaacggacggccgagatcaaccctatccaaaacggacggctgagatcgatcggtccacgaccggctcacggcgaacggctccgatgacgtcagcgatgacgtcacctccggcagcggcggctcggcggctcggacggctcggacggcgcacgctcgccggcgaacggcggctctacggcacaaacggagggcaccaagacgtagatcacggcgcggcgaactcaccgatgaccaaaacgtcggcggaagaccaacggacgacggcggcggcgaggaagaagcggcggcggagatcgggtcgacggcggcgacggagctccggcggtcttcggcggcggcgaaggggcggacgaggacggcgacgaccttgcgaacccgatggaggcgacggcgaccgacgacggcggctgcaacggcggcgcgacgcggctgaaccgacggcaacgacggcggcgactagggctacgcggaggcggcgctagacgcgacggcaggctaaggcaaaggaggcgacgggtagaggagagctcgggggtccttttaaaggggctaggaggcggcggcgaaggcccacggcggccggcgacgagaaggaaagcctgcggcttgaaggaaagaggccgatccgaatcgaactcgattccacgaacttccaaaacgatttagccgatgtttccaaaggagaaaaggtagaggagatcccggagattgtttcccctcaatcaattcggccggagaaggaaaggaacggccggatttggaaggaaacggcgacggcggcgcgctagggtttcgggcggcggcagccggaggaagacgaagggtccgacaggcgggccccacctgtcagcgaccgaacgcgcgcgcgcggcggctgtggactgggccggctgggccgaggagagagagaagggttttgggccgactttcggcccaaagccaaaagaagagttttaaaacctttttcaatttaaattatttcttaaatgcaattccatttattaaaaatacttccttagctcaaataaatcccagaaaaatctaggaattatagaattaagcaaagtatttaacaaaattttatctagcccaattttatgttgagatttagcaaattaaaattagatcttctcttttaagcttttaaaatcatttctaataattccttttaaacaacaatttataatttaatgattttaaacaagaaaaacacttaacaaatataattagatcattaatgatcaaataattactgaactgttctttgtatcatttaggaattaagctctgaaaaatccgagaaaatttcagagagtataattaaccatggagaatttaacaaaaattaaatccatccatgctttatatttaggaaattttatttcccacatttaacttcacttgtaaaataaagaacacttaatataaattctattaataatttattaaataatttataaatcctgaaacgaaaatcaggatgtgacagtcatgagaggacccatacatcgcacaagcacgcagggaacatatgcatgccgcacacgtggcactcctaagggtttcatgccgtactcgcacaatggggagtcgcactccagtcagaaatggttagaagtgacccaaaactttcaatttatgtttcaacactctcatattaagaatcacaaacctccaattccaaaacatatgaaactttcatcctaagtcatataaagcttttaattgaaaatttaaaactttcaccttaaaattatgaaaactttcaattcaaattaaaaagaccatcttaaaatcacaaaacttttaattgcaggtctagaattttatcttaaaatcataaaaaactttcacttcaaatttaaaatttccatctcaagaatcacaaaacttgcaattcaaaaactttcatctaaatacgcaaaatcccttccccatcgctgcctccaccacgtgcaggtgtcctactgctgcctcaaagcaaccacatctccgccttcctgtcctcgctgccgtcacaacctcaggtaggattgcggagctagatggagaagggaggggcccaacgtgtatggctgaatgagctgagggcggcagggatagagagaagcgagggataaaaggagactgcggtacgtgcggcaagggttggagatgaagtctgggccatgaatgggtgccggcagcgcagagcgcatcgaggaggcgaactcgaacgagaggagagacgagaaaagacaagagggattcggtctccacctcacatgtctaacatggactatacctatggtccggatgtgcgctctcaacgtatactccttccgcctcataaaaaacaatctagtgccgaatgtaacacatgctagtaccatgaatttggacgtaggcatgtacagatttcgtaatagaaatatatcacatcttatcttaaaattggttttcatgggacggagggagtacgtaccaattagcatttgtggtgccatgaatgattctgcataatgtatgtacacacgagcttatgtaaggccatgtttagttcacaccaaacttccccaactctcaacttttcatcacatcacatcacatccaaaacttttttagactcataaactcccaactttttttctaaactatcaacttttctcaaacttctccctaatttcagaaactaaacacaacacagcctgatactacatgtatgtatacacggtcaggagccacaactcctaaccaaatactgcaggtcgatgcgtacgatagtacgtaaccgtcgagtcgaatatatgcagagatcactagatcagtacgtacgagttagctagctagcggtatctactacagataccacacgatcgattcgacacgtagcgattgcatacgacataaatcgactccttgtcctgaaactggaaccagatattgtgggcctgtttggtacagctccaattaacttctaaatttaacttcaggagttgagtctggagtggagttgtgtagctacctaaacccagctccacaactctagtatattttgtaagagagcttcatccaactccactcctaattttagtggagttgaaactgtttggctggagctgtgccaaacaggccttgcatttcttttcaacaatgtacttacttacaactgtagctatgcaaaggatcggagtacgtactgattaaattaagttcatgaggccgatcgatcgatctcagctttgccgcccggctcatttttctcctctaatttttgtcatcaagaaagatatttagatattgtacgacgtcctatatgttaatttcctgtccatcctcatgaatatatgttgtttgcacctgtttttgagtcaaacttgtaaaaccctgattcaactgttcttgcatataaacatttctaattgaaaatctactgtccgacaaaaattttctatgatttagctatgcaaaggatttcacaaattttcatatgtctaattaaaatccaaaaataccctattgagaattattacatctatcatgccatgcctgtaaacctaattattgcgaattttttttattgccattgcagatcaaatgaaccaaccgatgggagctgagaaatatgtgcaccaaaggaacacgtattgacgaaaggccgctagaaagagcaatatagttatgagacgagacaaataactgtcgacacttttgttgtcttttggagagcaaagtcaaattaattaagagctgatctaataacaacatcgcattgctaattgctatacggatcgaaaaggacacggctagctctgtggctttggcttataatttgatagtagaggagtacatcgcagctggaaattcttgtcaagttgacgatgatcacacggagatacgacttttatgtttttgattacacgaaaaacgcacacgcgcactgtactgtatgcggtgaatgcggctatgtattgaattgcttcaaaagctacctaagcacatatttttacttattatttttgggcatctgtgtgaagtcttctttactttaatatttatatttgatttttttattatagtatatttatagaaagtaggtaaataataagggaaactatttgatccttcaaggggatgtcctcttgttggcttaaaaaccatctaaaatgttataaaaaaatcctggaaaaaattggctacactcatataacatatctatacaacttcacaaaatctcaagtctaaagtcaattcacacgtcgaaatataaaaaagataaattcagcgtatgaattgtaacgctctgttcacatctggatatcttttttttttctcgatgtgtgtaggttgaatttgaatttggttttggtggatcaatagagattgtcaattttttttcagaatttttcacaactatttgtatcgaatttaaaagaaaaagttaccgtggggatgtctcctcgagagattagaatccactcccaaataatgtctataaaaaatgaagtgttttatgtatttagtagtgatttaggatttttaaaatttaactgcatgttttctgaaacatatagtgcctatctttagtaattaagtttttttttacatgtatgagttgattgcgacaatttatatatatatacggattttcaaatcgtgaaacctaaaaggtcctagtacgatgaagtcgtacacgcgttgtgtagttgtataccaagtggggttaatatatatcatctagctagatttgacgtgttaatttcaactgtcgacactgatcaacgctagctacaaaacttttacctatgcaaagagcgagttaacaattatttgttgaacgaaacaacgggggtgtcagtgaagataaacacggctataaaatctcatacaactgtgcacctacagtgactatgaattgataaaatttggtaaacgtaaaactgtgaaaatggtgcgagctagcacaactcgtcaaatttgaacaattaattcactctttgggaagttttttttttaatatacatcagcatccaagcaaatggatgcctgcagatgtatttttttaatgtaccacattgtttagttctagacattacatttaacgagtcatcttattcaaaatttagtgtaaataataaaattattagtcatagttgatgaaatgatacaacacaataacaaatgtttatccaaaagttaacattgttatatattaaaatacggagaaagtaattctatacatatctatctactaatctcaagctagcagttatgttggcttttgattgggccgcgtggcgctcatagcttctcaaataaatcctagaatccatctatgaaaaaattatagaaatccaagagaaataaaaacggcaaaaagcttttgtctcatgcaaacacttgtgtgatatcattctagaaccaagtactccaaatcaaaatagtaccataacaacacaacgtctaaagcattccgatcaggccggtgtgatcaacaggatggtggatgcatcccatatatgctggtccacttatgcaagtttcaagtgggtaatccaaatttataacacttaggttttgttgccaatttataaccctcagtcacataaaaatttaatttaggattggatgtgatatattctagtactatgaatctgaacagatgtatgtccagattcgtagtattaggatttgtcacatccgatacaaggttaggtttttatgtcacggagggaatattataatatatccggcccctaataattgcattactatcattcaaattttatcataaaaaacttatagttttgataagatgggacacatcaaatggaatgtgtatcacaaccttccttttaatcaaatttacataatggaatatgtgcatcaacctttcttttaatcaactaaacatatggaatatgtgcatgcagtatagttaatactctaattctctagaaatagggttattgaggtaaatgtgtttactgttagttggcttctaattctctagaaatgcaattattttggggcgaaggtagaacaaaattatatacttctatattatttttttttcaaataaaaatatcgcaaatattccatttcatatatcttttagaattaatcttccaagtgaacaattgactcatcttacaccagttactctaacttgacattgtggaatatctctaactaaatgacttcaggtaagtaatattaacatgtgtttcgggggtgaatttcattccaataatttcttttttatcatcctctttgcttctgttttcatagaggaaagtcttcaaatctctcaagaaaattggtcaatttatatatctcaaacaggaccaacaataccacaaaaaagtaaaaaactatattaaccagcgcaccaactggtgtacctattttcgtgtgtgtgtaatccatcctcactaaatgtagttaatattaattttatttttttctcatgaatacacatcaacttaattaattgtttttaacctttcgatgattcatcaaatatacaaattgcatctcttctcctcaaaagtcacaccatataacccaattattaacctttggattatttgatcaaggtaaaaatacataagcacttgaaagaaaatcatatactccttttgtcccataatataacaatctagaaccggataagacatttcatagtccaataaatctagacagagacctatacagattcgttgtactgtgaagcgtctcatcttgttctaggttgctatattatgagacggagaaagtactaggataaaaaattttacccatcgagtgttattttattatataattctcaagtagcaatgcgaggcacctatctagttgattaagtttttctcccgtggtcatgcatgcatgctgacaaataaaaaaaatagtccacaccttaatccagttttatatgaaagttgttctaaaatatcagattaatccatttcttaagtttataacaattaaaactcaattaatcacacgttattatcaccttgttttacgtgaaacacttactcttcatcttcaggagattcaaacaccaccttagtatgattaattgagttttaattgttataaacttgaaaaatggattaatctgatattttagaacaactttcatataaaaaattttcgcacgaaacacaccgtttagcaatttgaaaagcgtgccacgaaaatctaaaatttaatccactgcttgtagcggaaacgaacaggaccttaattagtgttgataaattaaaacactttagtgcgcgcatagcaggtgaaaaggggtattaattaatccgttaatccaagtctacttacgaaattaaaggcatagttaaagttatatttggagcacaggtacagtagaacctgacgaacttggacacaaaacgaatggttaaactagcagttgtacgtatgtggcgttgcgtcatagcttacatgatcagtgcgtcgtgacgccgatatatcagtcttcttctatattattttgcccttaatttcttcgcataaataattaagcatcgttacagctgattacgtttgtgttaccagctctcttatccaaatgaagtagattactcttaccaaattgggcttcaaggtagtacagatataatcatatatagttatttttttcgaagttcggtcaagtttgactaattaacaaaacaaaattgtcttggatgcatccacatcgatctaggtcaaaaacataattaaacattactcgatgggtctctgtctctctatgaacttcgccaaattaattctcgtcctgtaaccggaacaataatgaaaaaaaaaagaagaagaaattacattgtgacgacgccttaatgttacaagctaaaaatactcattaattaaaccttctctggttctaacatgacctcatgcttattccacaatgcgaatacgcatcggtctagctccctactttaatttgaggcttctatgcaaatcagaggttgttgaataacgtcaagtaacaattaattaattaatcaaataattattggtgacaaaacatcaattctagctttgttaaaagaagttaaattattattcttaccagagctttgtgtattaatttgacatacttcctgaaatattaataagttgtttcaaattcattgttattttttactaaaaaaagtggaaaatatgtacaaaaatcattaggtgcccaatattaattgtaactccatcaggcaggtctggaaactcacctcattttgctcaagtttggtgatgaaacagtgaacttagctataattaatgagggaaattaatttattacaaatttcttcatccctttacacatgttagagaatttatcagagttctatctaggtatcccaagtacagcaacatgtcatccacataagtgatcttcacatctagctagagttaattaattaagagtacgtactcgatcaaatttatatcttgcaggtacaagattgcatcattcagcagaaacatggatcatctattgcaaataaacattttctatcaggtacatacatcaggaacaaaatttcaactaccatttcaaataattgaatttaatcatcacgtaccgagctagctatagggtaattaagacatgaaaattaaaaaaaaaatctggccaatgggtggttaccaaatctccttcggctagcttgtcatgagaattgacaaatatgtcttgatgctcttaatggcaaagggtgatggctaattaaacactgtggaatgacgcatgccctagagagaaatgtcaaagctgatgtaagaacattaacaatatagctagctactgaaagaacacaatcatggcacttaattaaatcgtggttggttaattcttttcagggggatgaccacctcatttagcttgtgcatcaagagatgactgagaatcaagtctagctaactgctaattaataagcagataaatgagttggatgatgtacatcatgtcacacacttacaaacaacaacaaatggaattaaaatgaaatatccaacacttgaatttactacttaattattcaccaactggccgggttatctgcttttgatattgtcaccaaattaactgccaccactggccagtatatcgatcaattgcaacgaaatttgaaatggacatttgttgttttgactcagttaatttggagtaaagtgagtgacctttaccatttgtacatatgcatgcatggtggtggtggtttggaatgtacgtacctgatatgaatattcataaaagttaaaaaaaggataatgttaattaggttaaggtttaatattgttatcttaccctgatatgaatccactgaaatttataaagagtaaatttcatcatgggctacctttttttaccaagtgtttcacattgggctagggctaaatcaagattttcacttaacaccatgcatgtttgtttgccaagagttgcactttggggcaggttatgttcacgatctggacatgtgacctcgccgttgatattctgctgctgtggctcttcactgtgcgattgctgtgtatttcgttgtgatggtgatgctcgacctccatgtgatcggcggcgtccaatcggggaggacgcacgagcacggcagcggggcgaatggcactcagttcgaacagctagctagcttcttgatgtgcgcatgccacggttcaggtagagatggccgagcccaatcgtgacatgacggacgccttaattcgatgagcatcttgaggcggcccttaggaagcatgaactactcctatgaaagttagcttagcttagcttgattgctagtcaccgtggccggcgagagggactgccatgatcaatcggatcatatcgccgcgttgcgtgggacgatagtgtccacagtgctgcgctcttccatttctaggtgttgctgcatgcatgccacattgcaatcatctctattacaagcttgccggcgtccacaatccaatcatctccatcacaagcttgccggcgtcctctttgctccctcttttatctcctgatctaatgacataatgacatgtgagagcatccagtccaaagtgagtttttagtaaaagaaactagcccaaagtgaaaactttgtctttaggatggtccatattgaaactttggtaaaaatacctagaccaatgtgcaatttactcatttataaaaaccctttgcggaatcgcaaaccatgcatgcattgagtccccattcaagaaaatatataatgagttcctccatactagagatatgcaagaattaagaagcatatatatattatggatttgccaattggttaattatttagttataataaaaaaacattcagaaatttcgaatattaatttatgctggcctattaatttcttcacattttcattgcggtaggtgtttgaaggctactttataaaaacaaaatggtattgttgaatgaaactatcacgaataaaataattaaaatgatattttcaaaaataaattttgtaacactttgtactagaagatcaagcttaattattcaggggtgccagagataagggtacacatcaatcacacgtagatgtcaactttggaaataaatgggtcacgttgtgttcctcaagaatattgctagtatcatgcatgaagaatgacatgtgacaaaatgaatacatgaccggccgtacaattttttttgcatcattttcaaaaaggatggccttgctagacaacagtcaaatttgtccaattcattggatctcagctttgttacattattacacggaacactcgcgcgcgcgcaccatcacacacgtacactgcatatttttaaacgtacatgtggaaatatttctcgagcattcataaattggtgaataattcgttggttgtacagcaataatattgtccagaagctgtgcaaccacagcgtagcacggtagctatagtctagaaggtgaactcttgtcagcaagaagcttcgaacttaattattttcacaaagacattatttcataaaaagcaactgttaattaatggtcctatatatcgatggggacacactagtggtggtggtggccgatgatcttcctggccatcgtgcattcgtagcttagacttggcggtgaaaactttttttccttatttattggtttgaccagagcatttatacgttagatattaactttatatttgttcggaaaataattcctagatcttattgagttttctttattttttttccttttcgttttggtcttgtagaattacatgtacgactttaatatgtgtggagattttgtccggatttttccatggttagtctacggactatggctaattacctgaaaaaatgaatcatttaacattactacaaaacaatgctttggtatcgattgggaactggtatttagcaaccaacactgatgaggcgtcttataagtgcttgttatataactggcacctatagaaaggtaccggttgtgaccaagaacctgcacctatataatattataattcacatacgtgtcaatataattaatatgacaaaaaatgttaaacaataatatatttattaatctagttcataaatcatctaccgtttattaaaagtcgtgcaaaataaatacaatgaggattctatatttacattgaataaaaaattatagatcttcgacaatatattataacattgggacaactccgtacacaactctaaaccatacagtttaaattaagcactaaatagttaagtattgtcagtacttgattgcaaattacaattatgatgggatgagaagggatctatgatgttactaaatgaacacaaaagagaaaagaaaaatacacctaaaacaaaataaaatactttttagtactatatagcagacgactgatttaatttccaaaataaccttgtagcaaccaaaattaaagatctccaataaaaaaaatagagcaaaacctctccccctttagctggtcgacccagaataagacgtgttgttctcttttttgcctgatcagcatgagaggaaagaagtttatatatgtacggtgatatcaaaggtgtcgattctagccacgtactgatacttttgtctgacgatattcaaatgtgtcggtttttagtgggacccaccagcggctgcttatttgtaactgttgataggctcacagaatggtgccagttagggttaacaaccaataactgtgctcctgaattataggtaccggtttgtattaacaaccgacctatgtattaatataggtatatctcgtgggcatgcgctcggttgggaaaagccttataggtattggctctatctagagtttgtgtacatatatgtttctatttgctgttaataagataattttatcatctttgaaaaggtaccgaaaggtaccacattttctagtgtactactacctccgtttcaggttataagactttctagcattgcccacattcatatatatgctaatgaatttaaacatatatgtgtgcctatattcattaacatctatatgaatgtgagcaatgctagaaataagtcttataatctgaaacggaggaagtagctaatacttagtacctctagatattaagtatcttgaggtaccaaaatttttagtgtgaaatcttggtacctccaaatactttctcaagtactataaaaattttcttgttgttatgttgcagtgtgaaaacaaatgtcgtcttcgatcgctcacataattaggcccagtttagtttccaaaattttcccaaaaaacatcacatatcaaatctttggacacatgtatgaagaattaaatatagataaaaataaaaactaattgcacactttgcatggaaatcgcgagatgaatcttttgagcctaattagcccatgattaaccataagtgctatagtaacccacatgtgctaatgacggcttaattaggcttaaaagattcgtctcgcggtttccagacgagttatgaaattagttttttcattcgtgtctaaaaaccctttccgacatccggtcaagcgtccgatgtgacgtccaaaaattttcattttgcgaagccttaatcgatgcattgcagtacgtgcgatgcaaacagtgccagcatatgatattgctgtacacatatacatatgcgatcaacagagtcaagcagcagcctgccccatcatctcgagaccaaaatgaatcgaagagtcaagccaatcgatcgaagagacacatcaattaatatgccttgacgatttctgatggatatccaccgtccgttctgtctcgatcatcggtagccgtacgtcgatcgatcacagtgcatgcatatgaaatcccagatttttcgagtagtcgccgtcgtcgtgtccatgcatgcactcactagatctttctccagctaaagctttatatagctttgttgaattcttcagagctagagattgacaagtcatggagatgcaactgttgctgaattaattgaaataattaatgggtgtgggccgcatttgaacatgctggaatgtgtaaaactttgaaattgtttgcaaagttctttgaaaagatttgtatgtgtctgttttgtttttatggccacctgccatgctgccacctatatctctttcttccctggctatagctacacccccaagctctgttgatcgatcaccattggttagaaagtgacacatttggtggccatgtgggaatatggcggtggtggtggtggaggaagtggcgattccaatatgtaaggtcaaggcgattgaagtagtgggcggtagcaatggccgctcagcgacacagcgagacgatggtggcgttagattttaggagatagtgaataaggttagcgtgataggaataggtcgagacgccgctgaccatggctgaccataggcatgggttgacgatggcggtggatgtcatgataggtgcggcgtgctagggaggtccatggtaattaaagtggtgtgtaggcggtaattagacattctaaataataggatctgtacgacagatatgggctatggcagtatcactatgtttagaaaagctgaagattataagaaatatatagctcgtgagtacacaactagtaagagtcccgagaaattgatagcctaacttctagctgctagtttgttttttttttggactttatttgaaataatcttaaattcttgatgagaatttgaactatttaagggagttgacgattctagctggatagctagaccagccagaagcttcgctaaatatagcctcagctatataaagttccatttggcactggtcaccgcacttgtgcactgtagcatgaacggtggaagatggaaaatatgtatgtagagtaccatcacatatatatatcatgagtgcttcttgatctcaaagggcaatcctgcatgactcatgtttttgttgactttatatattgcctttatccgaattctgcatgttttaagtctggccgaaatcatcggctctctgttggccaacatgtttgcttccagtagcttcctcatgtgttaaattatatgctttatagtattcttgttaggtcttaccaaccttcggcaaattaatttgaggctgatattttccgacaatcgaactatgcctgaaaacctagaccctttttaaaatttcttacgctttcttggtttggagtaccatttagagcatggataatagtgagctataagtttactactacctttgtcctaaaataagtgcagccgtgaatatccgtgtccaacgtttgaccgtctgtcttatttgaaaaatttgtgaaaaaattaaaaatatttagtcacgcataaaatactattcatgttttattatctaatagcaataaaatgctaatcataaaaaaaattcaaataagacgaacgatcaaacgttgaatgtgaatagtgtaaaactgcacttattttgggacggagggagtataatcttacgtggaggagagaggtaacagaaaaaatcaatggttttggcttttatgcaagagttagtttaacacaatctctaaaacaaatacattaaatatataagtaagagatagagagaggagaagaaaattgtagtcaactttatagctaacctattatatatgttgactttaagatgtgctaatagtatgaagtgagctctactattatccttgctcttagtagtactaattaaaaccttaacgagtgttgacactaccaaagtatagaatttgtgctagcatataagcaaaaatttgatagcaaactttacattaatatgatgttattgaaatttggcaaaatgttggcagggtaaaaattagcttcaatttaattaaataagcccgttatacttctgtcctgagatgtccttgacatctttagcttaaaaatatcatgatttatgtggttccaaaactaacaagctgtgttaatcgtcctaatataaaaatgcatgcctaataaaaatcgtaggctgggcaccaacctacgaatttcagtacaatttagctagcatgcatcatatcgctgtgatattcacaatcaatttcttaatgacactagtgacatattgcagtcatttcgctgtagttagcttccaatatcaatggagaatctaccttcaatttgcctctccagctgcaatttcaattgatcgtaatgtgccttacacattacgccctacaatgtgtgatatatgtttgtttcagttttaatgcttgaaacaaacaatcaaaccctggaccaaaacaaatatcctaatattaatttatttgttctaaagcgaacgtaattttttttcagattacacggcagacgcacacgcgcgcacatcactacacacgcaactccccactcacaccccccacgaatttgtcccctgacacatgctttaagagacagaaaaccagtgacacacatctatggtctcactaaagtcttgttgaaagtacacctgcatatgcgtaatatttgtgggcatcaggatttgaaccctgtgggtaagtcatgcacccacgactctatcgccacaccatttgtgcttccccaaagcgaacgtgattttgttcctatcacacatgtcttctagctgctcggtaaatcttagctcattactgatgagttaatcccacaaggttctctaaaatattgtcaaaggtgagatattcacaacttaggtcccattttaataatttaagaaaggacatgaatttcacagaaaaaacaatttgatccccatagaaataggaattttcccaacttccagggggtgcctgtagtgatgccccaaaatcagattatttaaatacggttttcttaatttggatttataattccacgaatttaatttaatattgcaattcgtgaaatctccattctgatagcggaaaattatatgtggcaacatacattctttatataactttttttttcttattttataattttgagtcgactaaggctactgtaatcgggaaaaaataaaaagaatagaatagaatagcgcaaatgcagagaaggcttgatggccgaagaaaatgatagttaataggaaatgattaacatctaagcaccaaagttacatgaacagacggggcctagcgatgctccggtgctctctactagtataatagtaccaataaaaatgatctgaacgcttcgttaataagggtaaattagtaatttactagtatggtgattagggataatcttgttttttttttcatctagatcgatcaatggtcatatattgcgttgatgtcgctcatattccataaaaaaaaagctaagaaaaggagaaaaaaatgtgtcagcaccataaatgatgattataccctttcacatctttttttttacaataatatccctccaagtttctactaccactaacttaaaatgatagtacaaataaatttgaacccttgattaaaagatcaacgattcatattactttttactgtagatagcaacatagtgagctcatgtaatgtaaatataattagaaaaattacttgataccaaggatattttgctagggtcgtcaatcgtcatagtttaatcaacgcccggtgacttataacaaacgaccggtgaccatcgataaatgttatgtgtaaagtatcttttgacatgcatatatatcacaaaatagggagaggagtagtgaaacactcaaaaaagcggtcaagtgatcgcaactgtttgtatgaaattgatcctgaatttcatatgtggtgtcaaacggtagcaaattctagagtcatattattatagtccttataaaaaaaacggttatcaaatcgacgaaacgacaagagattaatattagttcactcatcactaatcaacctaattaaagtcacccatattaattctaaagccattggccgttgctatagctgagctaagctgcaggtacctaattaaagtgcaacgtaaggtcgtaagcacaatgttttgtcaaccaaataatcgctgtcacccttacgtgtcggatttatgtgtagttcagctagctacccaattagttttgtttgctcataatacagtttaattactagttttgtcgctggcaaatcaccaacttgtagagagggttaattaagctgacgtggccatgtatggatcaagtaggaactaagatattgggttttgtttaattgttcttgcccattgttaaatggttaattacttaagatgtactccctctgtcaaaaaaaaaatctagatgaggattggatgctaccaaagataatgaatctgaataacctattattcagattcgttgtctaatgtaatatatcaaattcctatataagttaggtttttttatggagggcgtagttgtgattacttgggaggttagccacttggcggcacatgattggacagggggtggaggattttacaatgttatctactctgaagagatcagcagtagtcaacaactcccttgactcagcatgagaccatgcaaattagttgttatctcaaagggaaaacggaaataggttttagaatgataagaatatcatgttcattgttgcaactcttcatcgatttcttcatttgactgctaaacgatatattttattttgtaaaaaaattctatataagggcctgttttagatccctgacaaaaattttacaccatgtcacatcgaacgtttaagcacctgcataacctattaaatataggtaaaaaataactaattgtataaattacaactaatttacgagacgaatcttttaagcctaattgctccatgatttgacaatgtggtgctacagtaaacatttgctaatgatagattaattaggtttaataaattcgttccccagtttaatggtagattttatgtcctaagtttaatggtggagtcatacatctacctcacatgagccaaaaaagtttctccaacctatcttttggcttaatagtgttagagtggcttatagcttcaaaaagaccaaacgaaaatgcctcttgtttgtttagacttagacttttcaacttataagttgacttataagcctaaacaaagagggccttagtcatgtgcttataggctcgagcccaaacctcgcatccaaacggtgcctctctgttgacgatcaatttacacatatattaatattgtgttatgtgcttataattaatcctcttgttagtcaatccaaccttcggcaaattaatttggggatgatatttatctacaattggactgtgcccgaaaacgtaggcccttcttaaatttcttatgctactgtcctgagatgtccttgacatctttagcttaaaaatatcatgatttgtgtggttccaaaactacaacaagctgtgttaatcgtcctaataaaaaggcatgcctaatagtaactgtaggctgggcacctacctacgaatttcagtacaattttgctatcatgcatcatatcgctgtgatattcacacaatcaatttcttaatgacactagtgacatatggtgatcatttcactgtagttagcttccaatattgatggagaatctaccttcaatttgcctctctccaagtgcaatttgaattgatcgtaatttacgtcttacacattacgcactacaatgtgttatatatgttaggttcaattaatgcttgaaacagacaaccaaaacctggagaaatactaatgtcctcaatatcaatttcctcgttccaaagcgaacgtgatttgttcctaccacatgttttccacctagcccagttggtcgccatcaaatctcgtctgtgtcgcctaccacgagagcggcacaggtgacaaaccctagccgctgccacccacctctccctcgctccgccttgctgccaccagagtaggctggccagcaagccatgcagcgtgccaggatggtagcggctgccccaaacctagcgtgggcagacctagggtgaaggacagccagggtgacgccacgacatccaagctcacgatggtggaggtcacagagggcgtgccatgtgagcatcggctcaacggcaaggcagtggaggcgatggctaggactcaaggtggtggtggaggtcacagccgaggctggaggtggcagtggaggccaccaccagcccgcaggtggtagatccacagccgcgaggacatatccacccagacctgcttaagggggaccaacggatggtgatggctatagagatggtgtggctggggacctctatgctcgcacggtggtggaggcgatggcaatgtcttgactaaaccctgtgaggagggggacactatctggaatggtggcagagggagctaggcatggaggtggcttgcacgaccagatctggcattctattggccagatccggtcctctcccatacgatgacaatggtgggaggcgtgcatggcgaggtccaatgcggcacaaggatggacaatgacctggctggtcatgaggccgagccctacgaggcagcgacggcgtgagacagtggggagccagtgatagcgttgacagggcttatgggcttgctatccctagtgatgtgcagggatattgtggctagtgtgtcgtcaactcgccagagttcaccaatgtgcgggccacctttccctaggcagtgcgatggaggatgctcaggggttgccaacggtgatgacccccaagtggaggcctacgacagtgacaggcaggcggatgctagctggtggggtcgtcggtacagtggtttccatgcgccgatgttgggttgttggtggtggagcattggagcggcaactgcaaattgagacggctcgagtagccggtgaaagcttaacccgggtcttgctaggacgacaatggtggcaccttgggcgtcactttcccttttaggggcgttgtcgagacgtccctctcctttcctagttgggccgatgggtgaaaaccttaccttggatctcctttgagacctcggtggatggtggcagcactcttcatcgtatttctccctagagacgtcatctaggatacctctttatcgccaaaaccactttcagatagtttttgcgaagggcttagatggtggcatgtcaatgggtctgttcgaggaagagggacctttcttcgctctcgcctctccctctacaaccttccattccagcgacgtctaggagtctaggtgcttagctatttggagtcgactttgggcatataactatagctctttgttggtttagcggcgggtggtcacgcttagcggtggccagttaggtgctactgccttcctcggttgcgtggaatggcatgtgtggtggtggtcttttgttttttttttcctgactataatctttcaggttatagtcttgtaacttttttctgctatatgctgctatattcaatgaaacttcgcccaactgccgatttgttcaaaaaaaaaagtttttcagctgctcagacaaatcttagctcaggcagatgacttaattccacaaggttctccaattaagatgttgtcaaaggtaagatattcacaatttaggtccctttttaattagagtacaggaatttcatagaaaacaattcgattattgaaatatggttttctttggatttataattccacgacttcaatataatattgcaattcttgaaatctccaatctgatagcagaaaatatgtggcaacatagatttttttttccaattctaatagagtttagtatgtaacatattctttatataacatgtttttctcttattttacaaatttgagtttttaaaaaaatgagcattattgtatatgagaaattataagttttaaaatattttattgtaaattttgtacatgtgaagtgttgtttaaacttgtcatctaccaccatccatctatatgttcccaaactacatactactacaagacgcatggcactattttttgtttgaaataagttaggcgttattaacaattctacaaccaaaattaaatttctaataggcatgttattatgttttattttgaagtcacacatcataccaacgaccgacacagatgtaggaccagatgtccagattaagcacggatgaacctaattaaggagcacaggtgcttccaagagctatctgtgccggttcaagaacctgcacaaaaatattactccctctatcccaaaatgtttgtcgccgttgaccttttaaaaaattttgatcgttcatcttattcaaaaaaaattaagtaattattaattcttttcctatcatttgatttattgttaaatatatttttatgtatacatatagttttacacatttcacaaaagtttttgaataagacgaacggtcaaacatatttaaaatagtcaacggcgtcaaacatttagggaagggggagtatatcggaggatggggtcatcagtatcgaatgttttgtgtcggttcataaaccggcactgatgccagttacgaactgatattaatatagttttatatagttctgaagggtaatgcaattggaaaaaaaaaaggaaatgaatagtcactaaggcgttgtaacataactgaccatccataaatgtaatgcaaagtatctttagacatgcgtgcataacgtaaaatggggagaggagtaataaaacactcaaaaaagttggtcaatcccaactgtttctatgaaattgatcctgaattatatattcctcttttaaattgtcaacggtagaaaattctagctagctagagtcacgtacgatgaaagtgctttatattagtccttaataaaccgttaattaattaatcaaaccgacgagacgacaagagattagctcactaatcactaatcaacctaagttaaagccacccattataaagccattggccgttgctagagctgagctatagctgctatatatacctaactaattaaagtgcaaggtaagcacaatgttttgtcaaccaaataatcgctgtcaccttacgtgtcggattgtgtgtagtgtatagctacacgcgattaattttgtttgctcatattaacgtagtttactttgtcactggcaaatcattaacttgcagagaggattaattaagctgacgtggccgtgtatggaatgagtaggaacttagagagaaaaattattatcaccttctgatttagatcacctaataaaaagaataaatgcacctaaaggtattatatagatcttaaggtgaaggattaaataaaatgaatttagagaatgggaaggtgatagttaattacatgcatatacgacttgtactataaaacatagaaaaaaatagtcgtgctctgtattttgaatgggtagagcaattaatcgttcttaccaatactctcgacggttttataattcttgtcgttttaataaaatttaggcaacttttataattttgactagtaataactctaaaaaaaatacttaatttaaagacactggaacaacaaatatatagatttatcttacaaagtattgtaccataagtaaaaaaatgttatttattatatatattataataataaatagtcaaaagatatatttcagagactgtgttgttatccaaaacgtcaagaattatgaaactgataggagtatttaattagtgaggaggttttacccactatttcaaaaggtagttaattagtgaggtgcatgggtgattaattagcttggaggttagccacttggtggcacatggttggacattgggtgcagggtttttgaatgttatcaacactgacggagatcagcagcagtcaacgaactcccttggtctgacgatgactgcatgcaaattattactattagaaaaggaaaaaggttctagaataacaatatgaatattactttcactgttcaaacacacgtagaattatggatttctagctgggtatatatctcgatattcaatccttgtgtattggaaaatcatgtcacagctttatttttcaaaagaagatttacgtttattttcctatttgttgtttaaataaccatgccaatttatcagaaaatcgatgctccgaaatacttacttcaataacaaatgggcaattttgaaatttagagcttgcagtaggaaactaaaatgcagcaatggcgaaagagccctcacatatcatgcgttgtgttctaccagtgacatagtaaccggggcatttaactttttaccacttttaagatatgacaattaagaatttgccactcgcagtgacgaatccttagttaccacttgtaagagttgcaaatagttaaatatctctagagaaactatgttacacttattttgcatttttcttatgtccttaattttagcaaaaggtgctgggtaaagataggaatacaatgaaacacgtaattgaatttcttccaatggttagccctttcaagatatagatttaaaggttttcggaaaatatgttaatagtatgttggcatttgtgaaaacaaagaaatgggatggtattttggaatattttgataactgaagaaggatggttcacctgtttcaagaacaagattatcctacgtatgtgtaggatgaatgagacccttagatttttctcttcttaactggtaatttgcttttgtttttttttctttttcagacctagtttttttaaaaaaaataaatattctttttattataatttacactactagcatggcctggtaacaatttaagtaaaaaaaacttctcatcttctcatccaaacctcttcttagtcacatgcctttacactgttcgaattggacgaactggatacatattaaatttgccatgttttgttgcggaaaaagtcacggatgttttctcttggtttggaagtatcaacttccctacttttccaggggaagatggagttgccacttgcctacaaggacagctccatcatctctatctccttttggcatggatagatagcaacagcaatagccaaccccccccccccctcccccctctccaccgcacgatgcataagcaatggccgagatcattttcagcccatggagcacctaacttgtttgacatggaaagcacacccatctagccgacaatggctaattagtgattgacaaaccagagcgcaagagaattagctctgcatgtactagacacgcaaacttaattgtctacgtatgacattttgtacggattaaccaatcaagtgggatggattatttcagataaaatgataatatgactatttcgaacgcgtatacggctcgcgccctaatgagaccatagcatataatgtcttttagtcatagagccacatgcatatcccttaggattttcttatttttatggtgaattaggggcataaacagggatcctaaatcccaagtaagcattgttcgtctcttagatataaagttcaaccccacataaatacattcatatctatttgatttctactttacctatattaattttattttgatatactcatgttttcgattgtgcataatcagattgttggcataaatctctctatcttattagttattactaagagaaattttatagtactggagaggtaccaaaaaaataacaaaatttataggaaaacttcagtaacttccgatacctttttttaaaatcattctattacaaatatcggagaactcgaacactttaccaagattgtaacttcgcgcaccatatagccagtttctttagagcttgcttgaccgtacaatccggataacctcactctccctagccgaagtacatgtgtggtggccattggcttcccagaaagctggaaaagaacacaacaaattcaattaaagagatcaaaagagagacattgatgatggatcgactgctgctgcatggttgctgacaaaattgtacagtggtacaaaacattacaactgatcgatcgattgatcagtcaattggcaagagggttaattcagagagaagaaaggcctcagtaccatgtgtaaacaccccttcatcggtttcactttcaccggagaaaaggttgcaatcagaagctctatcaaatagtccagctttctgttcaaattccgataagctgtagttgtagaatctagaaaatgaattagaaattaaaagctagaaaaaccagtttctctatatttaagctggctaccaactagttgcttctaagaaattttaaaattttaagctctcttaacagattctatagttagctagtacggttagctggcttgggcagtgtgggcccgggagaggataattaactatgaatctgacaagtgaacccggccaatcaggagctgccaagtcagaggccctgtggttttaggagtgattgctaggtggttcttgggtcaatttctttggctggatgttgatcttgaaccaagtgatcagatcagctccgtgcatgcgtcgtattttaaaagcttatcatgggctcctttaaatgaaggaattttagtgccgaatactcacttaaattagttcaattcgtaagaaattcctctaaaattcatcagtttcaaatgagtatctacactgatatagaccccctttaatttgtagagaaaaacatagaatacttggaagatttcaatcttacaggaaaaatatcctaaaaaggcctttgaaacaaaggttcaaattctatcatttccttcaaaattattatgaaatagaaaatcctacaaatattttggaagaaaataagcgtaaggtcctacatcatgtttttcttcattttatgactctaaattcttgtgtgtcccctgtttgtttttaattcatataagacttcaataggtatgacattttatttccaagtttttcacatacatgtgttttcagaatcccgtgtttcgaaacgggggcctaaaatgcatattgttacgaaaacttagaaatttcatatcttcaagatgttgtcatcaaaatacattgacatgattacatctaaataaaaagttagtactatgattttgcaaaagctagagaatagcattattgtacttccaaaaaaatatctttattaattgtataccaactaaacagcatcatgcaaagaaggtactcctacttggttgtgcaattcaccaaatatcggaccagatcgaattttctcatggaaattaataacctctagaacacacaactgcaagctgccacatatacatatgcggaaaaactggagtacgctgcaattgttttcaaagcattttcgctgcgtgtttgagaaaaaatgaaaatcaaatgtcactgcgacttgatgcaggtagtatcatacacacagtactacaagaccttttttgccagctgtcacaatcgtacgccgatggttcacggaatgacggcaagatctgacggctgacaagatgctctctctctctgttgttaaatctgatgacggacggcctagcctgacttccaatccaagcaccggttggtatagttgttctcttttttccttatttttttctagtgacaatgaaatggtgatgcaaaatagtactacctccgtcccaaaataagtgcagttttacactattcacgttcaacgtttaaccgtccgtcttatttgaaaaatttatgaaaaaattaaaaacatttagtcacacataaagtactattcatgttttatcatctaatagtaataaaaataataaccataaaaaattttcaaataagacggacggtcaaacgttgaacatgaatagtgcaaaactgcacttattttgggacggagagagtagtacctgatgaatatattatgcaacatgtgtttaaaattacactcacatgtttttgtggttacacttttcttgtcttctcctaataacttgcctagagtatggagtggttactggtcgaagagatattacttcaataaagcttagaaagttctaatttggtcttcttataagatgttactggtcaaaaaattatggccctcccaaaacaaaaattttcacgttgtcacatcgaatgtttggacacatgcatagagtattaaatataggaaaaaaattgcacatattgtgtgtaaattgcgagaccaatcttttaagcctaattacgccatgatttgacaatatggtgtcacagtaaacatttgctaatgactgattaattaggcttaataaatttgtttcgcatttttctggcggaatttattagactatatttaatactttaaatgtatgtcgtatatctgatgtgacaactaaaaccaaaattttttcccaactaaacaaggcctatacttttttaaaaaaaaaacttttgtctaatatagcatcaattttgagggttacattatttcggcaaataccggtaatccaaaccttacgtctaatcaacctaagaaaacgtccaaagaatcgatagaaaatattcatgtaaagtattgtaatttcggtggattaagctgatttgttgctaaagaatcagaaagattcatatgaaatatttgtaaatccgaataatcaagtcgatttgttgctgaaagatctctatgatataccaaaatcttttaaacattttttttttgcgaaaaagaatcttttaaacttgaaaaacatatacgccatactcatgtaccatccattttgtcctttaaaaaaccaaagtcagaccaatggcaccgaaagaaaaaaggaaggaaaaaaaaaaggtttgctcatgacatctccagttctccacctctggcatccattattgagtttattaatcctccatccttttaagacccccacaagaagctgctgctctttgttggcgttgcttgctgctgaccaagctctcttcttctcctcctcctccttttcgtcctgacatcctcatcacccccctttgcaatttgcatcatcatcctcacctcctctttggtttaaataccctgtcttagcagcagccacagcacagcttccttcctgcactctctgctctccttggagcttttctttctcaagagacaagaaagatttcagaatctttggatggggatctgtgcatcttcagagcagctggagcatgttcatgagacagatgagagcattgtgtatgtgaaggatgagcaaggaagggggggtaggggggtggagagtgggggggctaggaaggtggcctccctcttctcccagaggggcaagaaaggccccaaccaggactctgtcatcctctgccaggtatcatcttcagttctttactctctgtccctgaatctttgctttctgtttgatgtgctcagctcagatcaatctgctcaatttctcctcttgatgaggctgctcaggccaattgtttggttttgtgctcaaaagggttcagattagttcagggcttcagggtgttcttagagtccatgatttgagcttccatgtgcttattaggccagcagttagttcactaccttttttttttaaaaggaagagttagtggagtacttggtagaaagagagaaaattcttttctttcccttgcagaattgcttggtatgatagaattagtgcctttcttgttgaattatttgtaggtgtgatgtgtggtgtgcagtgattgcctcttgttgggggtgttctgttcttgattctggctgcagaattttggggctctcaaccttgttttcttcctctcttttttccatttcttgaaagttcttgtggctgtatacagtatagtagatatttagttgaatagtggggatggatggattcattcttgaggcttaaattaaaatattgcgtttaattttcttttcttccatgtctaatcatgaatatattaaccttgacatggaaaaaatgtaattttggttggtcttggccaagtcttacccccttggttaccttcttgactttccaatttcttcacttaaaaatattcccatgaaaaagaatatcatctttggtgttttttctttcaccttgtaagaacaaatttcctctccatgttgttacaaccaatcattaacactaaaaaattagtttagaagttgacaaactgtttataacctgacaagctattccaattttacttcttgggaagagaggtggtgaaggaaaactgtcaaaaggtcaagggggttaatcagacaacttgagatcatgaacagtgattagtagtacagctaggttgtgctaatctactactacagtagcaatagctgttagatgtgatctgccaaaggacagttttgcacttaaaaaaaagtgtaatcactttagacttttcctgctcaatgattgaacctcatgtgtcccaatctctaggcacacacaccatgatgttcccaaatcttctccagaaagtttgcctttttttaacaaacaccactaatctcacctacctatactaccatcttaatttgttaacagcagcatcatcatcaatctcgagatgttctccatcaggagaatatctgaaaaacttgcaagttttttagtagagtttttgggtgatcaaacatcacatgcaatgcaaagatgcaatgtggtctggattctgaagctgatgagtgtttcttgggttcgtcagggattcggcatggaggacggcgtgttctgcggcgtgttcgacggccatggccggtgcgggcaattcatcagcaagctggtgcgggactacctcccgttcatgatcctgagccaccggaacgcgctgctcctggccgacgccgccgccgacgacgacgacgacgccgcgttcagcgacgacgcggcggcgtcgtcgtccgcggacagcagcggcaactcgtcgccgcagccgtcggcgtcggcgtcggcgcagatgctggaggagtggaggcaggcgtgcgccagcgcgttcgccgccatggacggcgagctcaagctccagccgaacctcgactgcgcgttcagcggcacgacggcggtgtgcgccatcaagcagggcagggacctcatcatcgccaacctcggcgactcgagggcggtgctcgccaccatgtcggacaccggctacctccaggcggtgcagctgacggtggaccacaagccgagcgtgccggaggaggcggcgaggatcaagcggagcggggggagggtgttcgggctgaaggacgagccgggggtgatgcgggtgtggctccccggcgagaactcgccggggctcgccatggcgaggtcgctgggcgacatgaggctgaagcggcacggcgtgatcccggcgccggaggtgacgtcgcggcgcgtgacgggcgccgacctgttcatggtgctcgccacggacggggtgtgggacgtgctgagcaacgaggaggtggtgtccatcgtgtgcgcgacgccgcggaagcagcacgcgtcgaaggcggtggtggaggccgccgtgcagcggtggcgggccaagttcccgacgtccagggtggacgactgctccgccgtctgcctcttcctccacgaccacaccctcggcacggccgccgccgcctccgccgcagccgccgcggccgccagaaaggcgcgcagggcctccaccgccacgccgccggcgagctgaggacacaaagaagctctcgctccggcgagctcgatattgtccgtgtttttgcagtttttgttgatcttgatgtgctgcaaatacctacaacctccgtcccataaaaaaccaaatcctagcaatggacctggatatatgtgtgtccagattcatcgctggaatttgactctttttttttttggacagagagagtatgaattagtagataaatatagtctattgtaacatagtttagagaagatgggaaaaaaagagaggcaattgcgaaaatgcaaatgttgccaagaaaagagagggaaaaaagaagctgtttttacttttgatgatcatagtgagggggagatattgtaatggctgaagaatggcaatcagccaatctgatgttgtttgtgagataccaattgcttgttggcaatttggaactttggaatgacattgtaaatacctcgcataaaaaattgtaaatacttggatatgttccttttatatttctagtgttctttactagacttttagtcttatcattaccaataaactcagacatggctgagtcacgagataaaaccataaatgaactaggacaccaaaaccctacataaaacccaaacggtgaactaggacattataaaccctatgattactatcgttatccttagaggggaagagctaaataaaaaggcaaaaggcaaaactaaataaaaaaaatgtttgttgacttttgcatagcattcttttaaaggtgcaacaatattttgaacatattagtaaggtctaaaaattacttattattaattatgcaagtttgttctccattttctctcttctggagcaatataggaaaccatcatacaagaatttaaaatatcaaaccacacttgatgcaaatcacaatataattagtaagaattaagaaatgcaaggtgaaacaacaagttttagacatggtttcacaaaacagaatacagacataaaattcatatgtatgccatagcttgtaaccaatgaatatgcacggaagcaaaagtatgatcccgtcattagatttacaaaggaacacaatctggcatctggcatctatgggggagaaacgtcagtggtgccaagtttaacaattgctggatagagcttggctgttgccgtggctacagtcatcatattcaacttataccacaattgtcgatgcttccattgagtttgacaattgtcggcggcacgttaacgccactgcttttgtctggtatcgcatcgatgggtgagagggagaagagagttctagcatcatggtaacttcgtcaatcccaattactatccactgaaggctacatgtgctacaacgcaggtatatgattgtaaaaccgttttaaaacaaatccatgtcagcaaaacgactcgttaaaactactctatgggtgatatttttttataaaatggtgatattaaatgagtggattagaagctaagggtctatttggaccactttgatagtgtgcgcaggaggcttgttcaaaacaaaactgaacgcttagtttgtggcccccaaattagcacatgagcaaaatttaaccaaacaaaagatccaccacaaaatgtaactagcgcttgtgcatcacgcatttcaatccagacggctccattgcatctcagaatttcaatcgaggcggctacattctcctatatttttcaacgaggcacgaccgtacggtgtacggtgagtgaactgtgtttctagaccaaaaaggccagcgtgggcccacgtcagccagccaggggccccaccggtcagagccgaggtgggaccgggtcacagaacaacaacgacaacaaaccacgcggttcaaagactcgacaaatccagcggcgcctcgacggagaagccgaaattcgatctccgatttctgttttccaaaccggcaaattccaagtagtagctgaattgaattgaattcgggaccccccaaaacgacatgtgaggaatcaatggtcagaattcagatgcgtgcactggaagaacagtggatttgagcagcatttggatgccgccgatcaatcgacgtgatggggattgaactgtttgaatgttgaaccgttcaatttagaggggacaacaaatcgtttaccggttaatagtacgatcatgaatactagttcctctgttctaaaatataacaaatcctaaagtttaaagtttatctcaaatatagcagcttattacaggtaaaagataacttttaccattaaacgatctatactatctctaataatctagacatatacctcatccatccggagaaagcaacaagtttttttttatctatttcttaatatctgtgataaaaattaaaatctttggtatattttaggatagagtataatttatgatgcaatgtatgcactctagatgggattatgtagtaatcagcataaggtttgacgtttgatgccccaagatcatgtccaatcatgtcttggagctgtacaagcaacacattctctacgccattaattacgtagagagccacttgtattaagggggccgttggaggatttgactctatccatacgggggcagcagcacaccagcagaggctagtggggcccacttgaccagcttggtattgggtgcttgcgttctttttcccttcaatataaattctttgggtgattgctagaagtaattcgtgtgctttctcacttgagttttgacttgtgactttgtgagtactcaatgtaccatcacctcctatatgtttaaagtatttgtttgtgttccaaattcgtcttatagcgaccaacttgacgcgcgttaatgtcgattaagattgggttcgagggcgagagtgacaagaggggaaataggaagaggaaaatgccatgatagtattgacaaaaccatgtgcgaaggggggattgtatcgcagttgtgttgctccccatttcggttttccccactttacccaaactacttttttgttgatcttggttatacaaaaggtacgcaaggacccgttttattggactgtacgttactcgtacaccgatggtgaatgtagatcctccaagtttttagattaaaaaaataatgtgttcgacgtgcacatcaatgtatgtgtgtggtgcggactgtggagtgagcgtgcatcttaaggctgtgttcttttcctcagtgttcccaacccctctctttcgtattccgcgcgcacgcttttcaaaatgcttaacggtgcgttttttttttaaaaaaagtttctatacgaaagttgtttaaaaaatcatattgatccattttttttaaaaaaaatagctaatacttaattaatcacacgctaatgaaccatgcattcatttaatacgcagtagatgaactctcaacctacagaaacacacagccttactatatttacagttcagaaaaccatgtgagaagaagaataacggtgggcggaagtaagaaccaaacaggttaacaaacggtcgatgcgacggtagctacaatatggaaggagaagggttgcgatcgatcttcgcgagcccccagctgaaagataaggataacgacgatggcgaacgcgacggtggctcacccaaaaggatgaggtggcacagggggggtagagttgcacggtagcgatggccttctagtagacagtgttggcgccaaaaaaccagcaaacaacatgacagtgagggtgcagccgccactgccaacaacatgacagttttgcagagaagaagatgacacaacaaacgccagccagcaaagtgtacacctagcgacctctactataatattccctctgtttcaaaatatttgacaccgttgactttttaagtatatgtttgaccgttcgtcttatttaaaaaagtttgtgaaatatgtaaaactatatgtgtatatgaaagtatatttaacaatgaatcaaatgatataacaagaataaataattacttaaatttttttgaataagacgaataatcaaacacgtactaaaaatgtcaacagtgtcaaacatttcgaaacggagggagtaacttattaactggaatcacatcggtagaagaagataagcccggttgaaaaaccgggccaaagtgtcgaggtcacacgcttccgcgttcaaacaggagcgtcgtcaaggtcaagaacaactaataacttcacatgacattgcctgtcaaagattaattactgggtccccaaactgataaaagaagaagacagaaaaacattggattgatccgaattcattccaaagctcagacgcatacaggcaaagcaccgggtaaactggaaagtgtaaacgtagctcaacttgcacggaggctcaagagttgagtgacagcagcagggggttgaaaaaggaacaagcaattaacaacaggcaaacgaaaccaaacactgtgaaagagaaaccagcgttctccaggaagtagctgaagctgcacctgcaacttctatctcaccttcttccagttggcaccaaccaatcttcctcagaagatggctaaaaatcaaatttctgggtgtgatcggctacagatttattttttcttggaaaccaaaatgtccatgaatggtattcatatctttgctacagctaacagaaagaaaagtgtgttatacacatttcagtttacgggaggattaagaagaatcgaaggtgatacaagccacaaatttttgatcacgtgaagattaatgaatgaacaaggcagcaaagaatagctacaataactgtagtaaaattttatgttcaaagatttggatgtccatgacaagagatggttgttagccctggctaggtggcattacatgtgaagaaatgaaaaagaaaagaaaaaaaaatcttacagccctgttaagcagatattttctgtgaccttcggtgaaattagcatcagcatcgcctatcttctgctttatctttcaactgctgattctggctacaaggcagctacaatcatatcttgggaccaaaaatgttgatatgattagatatatttaacatttactaaagaatcggaacggagcagcctgctactgtcgcaagtagcatcgggagtggtctcgtggaaaccgactgcctcttttggccccagtcatgaaattgacaacaatgtcctttgcaccatctccctggttgcatgtgaaagtagaaggcttcacgtcaaccaaaccaaaaaaacaattttctctctagcctgttacctatgcatagtacatgtacaagctatttgcagcagcacacgcgatggaattctcagttgggtgccatgcaagatggagcaactttgttgaaagatcgtaagaatttccattagcatcaactcccggattttctccacctgtttcatatgagctaatgtgatgagaaaagggacaatgagaactggaccagtcctagtccatgaatgtggctgaaactattaagtctaaagagaaaatagtcactattaagtctaaagagaaaatagtcatatacctctcctcacggcacgggtcaatgaggtcagggtccgtgcaggccttgttggattagcaacctggcgcctatggttttcaattccaacaatagaaacgaagtttagcaaggtttggaaaaacaaaagtctgcatttgagcgtgtgttgggttggtgttgacatgacgtgtttatacctactattaaatagccactggtcatctatgttgaatgattggcaatccaaccaactttgacaaaggaaatcaaataaaatattcgttttttcttctttgtaggtagtgccaaaattagaggaaaattaggcagcggtactgagctaacttaagacaggaaatcaaggggcacagccaaacaggagacggctcatacaaagggatagcccatatgtaggtcgagtataaataacaccagctcacaataatataaacaataacacccacaagatgagacatacctcataggatttctgcttgcttccaaggtggttgcctccgcacttccaggagtacaaccaaaaacacgaaataaattgctgcagttgaaggcaccacaaggagagttaacatatagtagttccaaataaaataatagttagcggcattggtaactcataatgagaacaagcagatacctgtaagagccagttgcaacacgaagtccatccccactcagacaacattcaaatttgtcaaatattgaatcattttcatatagatcacagagctgcaaaagatgaaattaacacggcattagattgtgacatgtcttaacattgacatttttgccatcattcaggttacgaaacttcaccttaggtcttaaatattcatgaacttggaaagttgcaactgggcctgaatccatgtttatatcccataactgaagaaagaaaaggagcaacggactaatgacatttcaagcagtataccacttatatgatacgtagtattagaatcagctgcagaatatataaaagttttagcaagaacttaactatggtctagaatgtctaaactcttaagagttgttttggttcaaatgccatttttggacaaaacaagacgagaaaaatggtgtccatgatcctaaggactaagtgaaagtattgctaaagctaatatttctttctggccgaccacttagttgggattaaaaataaccataggatgcagagaccaaaggaaaaaggttcaagcaactgtaattgaagataagtgaaaactgagggttgcagaacaagagaaacgcaaatgcatatgtactgaatacagctaatttacatgtcaattcaacctatcaaaagatgaaatacaacaaaagacaatgcaagatgagcatgttgacacaacttttaaataaaaccagtgccaacttgtcaatttatataaaaagcaaaagtctaagaaaatcaaacgaaaataggacagctacagaccttgagagtcatataatcacgactaagaatgtgccttccatcccttgcaaattttatatctgaaaccgatgcaattatctctgtaaaaaaggatctcgatccaggtgcctcatgctcctcaaatctgcacagaatgcgcactttattttagagaacagcttgtgcaaattttatccatataaaaattaacttcaaacatttgcaactttttaattccatcgaacatttccttctaaacaatgataaatgttccattaggaagtgcaagggggttactaacaacttagcatggttgtcacatagtgctgattgccgcagatcaataagcctgatagagcccttcgagctactataggctaatgtattacaatgagttgggtggaactccgcgcatgtgatcacctctgaaattgcacagaatttattaacatgtgaagcatgttgccacagaacacatagaacagaatgaacaagaattgtttcaggatcaaaaatttacagcaatagcccaaggtgctgcagcatcagctgatcaacaaatatattggggatcacaaatgcaagtatcggtttttgtgttcaaccaaaaatggactatacagattatccatttatgtttatttcaacttcctccattttcccaaaaaaaaaaaaaaaacggctactctaattcgttattttgcagtcttgtatgaaagctgccagatatcaattgtcaaaactgagctacaaagtgtatacattcgcaaggagacgctagcaagtataccaacatatagatgcagacagatgattcctcaagaatttgctttcccacccaatctaacctttaaccatagttgagcatggacaattttcagaccacccaaatagggagaaaacttcaaattaatacatagtgatatgcatgttgccattccaacaataggttattcacatgggaaatgcaattagtaattagggatatcaagagaactagtaccctgcatacatttaacacttgtagttgtaggataccaataattgcatggtaaaaggactccagttactttgccacgcgtcttactccactaataatatatggaacatcttgttattggaccgagtgaccaattagatagcattcgtgtgtttaacatttaaaactaactggaagccaaatggcaaatccacagcatgcctagcttatctcacactggaaaatttaccagttaggtcctccatgtttgcaggcttcacatcaacaatattaaagctttggttgctaatttccaggttccaaagatttattcgcagatcatctgctgatatgtatgtctccccgtcactgggtgtaaaacaatatgagaacatggtattagcttcatgctcatgatttgaaaatatacagaagcaggtagtattataggttcagagaactcacacaggaaataaggcacaaatcagtaaagaaacacagatacacgcataaacagatgaaaaaagtagataaataagcagtgtaaatgtgtaacagtttggagccaataaaacaacagaacaagaatcaaaattacaaaattacaagcctgatcagatatccataatatcaggaaggtagctaacctattatttgaaatggaattaatatggtaatcatgagcatgtgaatatacacgccggcatcttggtacaaggttcaaatcttggccagtgacctgcatacatagtaaatgaaaataaatactcatatattgtaatcatatgtgcagtttgccataagaagaaaatctatctataagtattcatgccaaaaggagacttattttacatgtgaacaccagatttggtgctgtacagaacaacacgattacagatgagataatgaataaagtgggttaagtacaactaccacaggcagacgcaatgatgtgcatcctccaggaggaaataataggtcgttgtttgggaagttgtataacttctctgagcatccaccatttggaagaatcgctctagaactactgctgcttgaactagaagttgtgccattgcctgaactttgagaggtattcaaattcatcactgaaattcgttttactttcctctcttgcacctgtacagatagtaaaactgtaatgtattgatactacatagcttaagtaataagagctaaacaaagaaagaaagagatagcatgcaaataattaaaactgtgaagcgattgtatggttcatttgtatctgtaaagatcaaagaacgaaaagcatgtgttccttgatagaaccagcctgtgaagaaatatcctgtccataccaggagaaactctgaaataagtttattgtaaatataactcatggcctcatggggcaaaaacattatgcaaactaaaatatcggatgcaaacttctagtaccgatgtaggcaattgatcatacccataagaaacgaaatgaacatggaagcttcgtgacacaactgtaccttccaatacttgattgttttatcatttgtagataagagaaagagggcgttgttggctgtttggcaccacttgatcttgttaatcttctcctctatttccaaactttttaggtagtcgaactacatggattacatataaatcagaaaaacaaattgagaaattccaggatagttaataacaatctaacatgcagtgcatatggcttggtaagataatcctggaagcctgcaaccaaagcaaaggaaaaattttgctataactaatacccctatgtgcacttacagacttgatacagtcattggtgcacaagcttgacaatcctgttgctatagactctgatactgtctccattgtacaactttggcaatcaatttcttgttaattaatatattagcatgagttaaaaatgctataacatcatgaaaacacttttagcaataatgtattaagatcgctatcatgttgtttttataaggttggatctacaaacagcacatattcatggatgaagggtactaccacgttacacctaactggatgttttttacctaccattgtatgtttgttacctaccattgtatgtactgtcagaattgacaatttcctatgcttatgtttcaaaatataatgtgatttcctccaacttgaaattttattataaactctcaagtttaagtgcctgacttgactcgaggttttcaagaaatctaacatgggcaaaaacatatattcagatcagatatttttgttacttttaaattcttatcaaaattatacagtccaactgtggcagatatatatgtcactctgattcatggaccaggggagacactataattaaaaccattttaagtttcacatacctcaggttcatgactctgaaattcagtcttgtaacggaattcaggatgcctggcaatcgggtaatcttgtctctcaagttcactccgactggcgctctgcatataaattgacttctatgagaacaagagatttaaacaagaaacctacataacttagatagtgtgtggtacttacatccctggagtcagtcctttcaaataaaactacacgaccacctctatctccagtggcaagatggtcaccggatttgtcaaactcaattgcagagatgatgtcaactgaaacaagaaacacatgtaattaagatgcatatcatgatatcaaaaccaccttgtgaaaaaagcaatgctcaagtcatttgacacaactttcgggcaaaatgaataaaaccacaaacatcagtacatttgaattgaagagaagaacggacaattttatgttaattaaactgggacaaagtatttaaaaaggtttgtgaggactatggcaatctctaaaaaagataaaaagagataagaaacatcactgctgtttggataaacttgagcttgcttgtttagttttgtcgactatgtgcaatcattgattggcagcagtggagtgcattttctgtttagaaaaaggatgctacttcctctgtttcacattataagacattttgggttttgaatagatccatgcatgtgcttcatatatgtgcctaaattcgtacggatgttagtgaatctagacgagggatggagaggccaaaacaacttataatgtggacagagggagtagcacaatattagtaggtgctgaaatcatgttaaatatgcgacaggtagaagaactggatccaatagggatataatttgcaggcattttcagctttatgctactgcattcatataagtagaggtaacactttgcctcccctaaactgcaccatcatacttatgtaccaatgcattttgtgtattgaataacactacaaactgaagacaagtagaagatcctgaattcctgaaggaaagctaatcatggaccactatggttgaaacaagaaaaagatgtgctgctaatgtaagcaagtcaaaggccaaaaacaagcatgcaaaacacaggcagttcatatgtaaatctgttacaggggaagagataataagaattatctcactactcattgagaaactgttatgaaaccaacacatctaaccacagaaccaggacaaattgaaaatcaactaagaagcaatatatcacataatccacacatgcctaacagaagatggcacattgaaagtagagaaagaaaacaggaaacatgcttatgagccctcatataagcacattaaaagaacatttagaacgcaaacattacccccaggagctccgcggatcactttcaattatgtgatcccacttcgcatgccaaagctcataaatatatatttgtagcaaaatcatactaggacactaggaataagaaaaacttgagcaatacacaatcaccacacatcatcgcacaaagattcagactttcaacactccccactaaagtgccatgatgtaaagcacgaggcattatgtccaggagatccaccaacccccactttcctcctcatatccttacaaacccactctaatggcaaacaaaaacatctcggttcacctacaaacactaactacctaccagctacaaagtcttagcgagcaaagcctacagcgcagggaagtgatccattcccgcacctggcatatagtttggtaaagccatttatttatttaaccagtgaacccgtgtcctatagatcacgaacggctccaccctacgcaacgaacaacctcaaaatcaccagcgaaatcccctcgattcgccaccccgccacacgcccccttcgaatccgaatccccctacacggaggaatgcgcggccaccccgcgtcgaaaccctcccacatcccgccccggaccgaggcagatctcacgagccacgcgacgcacgcggcgagcagcggaagggggcgggtcggcgcgttctcaccttcctgcacgtcctcccccgccgcgcgttccccgaagacctgcgcgaaccgccactcccgcggctgcggctgcggctgcggccgcctcgccgcctccgcctcggggcggaggtcgtcgtcgtcgggggacttggaggaggggtccatcttccgctcccgccgccgacgtcacgacaccatggcgcgtgcggggaagggaaggggaagggaggggagggatcgggaggaggttctggaaggttctggaagaatgggggggaggagatcgatgggggatggaaggggaggtgtggtgggggtgggggtggccaaatgatgtgggatcgatcgatatcgatctctcgcgcttttctttcgctgctggtttcctgatgactactctcatgggctcatggctgtctgtctgcggggaggggaacatttatcgcttggtcctcgagaatgtaccaattcgcattcaattctttccaatctttccaatcaattttaggtcatgttgttttgttttcggctccttcagagcacgtacaatagcatactataacccagctataaacacatatcgaaaagataaaagaggagaaagaggagtagcggggtacagatctgtagtcagctgcagcacatactccaatacacaatgtgtgtatgacatgtgggatcgtatattaatagtgtagtatatgtttatcggtaactattgtataaattggccattaaattgactatagatgatttagagccagcagccagctatactattaaacttgctgataagcttacgcaccgtttaacaatttgaaaagcgtgacataaatatccaaagttttaacccaacttttgttggagaaaagaaccggacctagtatatctagaagaataaaatgtgatactctctccatagtgcacctaagacagcatgtgacattttatagtacatgaatttgtatagttgattcgttgtactatgaaataccacatccgattttaggtgcacttatattgcgacagaggagatactatatcttaagactacgaatcttgacagtttgtctatccagattcgtagtcttatgatatatcacatcatgttctacatggatttatattgggacagatggagtaaactgagtttttaaaaattatagcgttttttgaaatagacttttatatagagatttatttttaaaaaatcaaataaatctatttttaaatttaatcaatcatgtgctaagtgctcgtcatgtttttttgtgccatcaaatagctcggccgagcatcactttcaaatgaggccaatgctggttcaaattgttgctgaaattaacattactaatatttggcattgccacattctgtcatagtttatcattattcattacctgattttggcaacgttgcaacattgaatatgttcagattctagtcttacaaaattttgtagtgttggtatgacaagaaacttctgaaaatgccaaattttggtagaacggtaatggctagaatatgtttagtttgctatcctactaaaattcggtaacaccaaaagttggtagggttgaatgtggtagaaaagtaaacaaaccctaacattcgtccttcacggtttcatttttacttgtggttgatttttgcttttctagggagtggttggtttttgttagtccatgtgtatgacattgatttttttaatcatatgttcatagaaaatattgaaattataatagcaaagtcatgaaaattctattagcactaatttttaatttttatataggaggtccatcatatttttcaatgtattggtgagttagtattttaatctttgatagctcgcatactataacttgttttaaaaactagtcacatccgcgtgctttgcaagaggatgatacaaggtgtgattcatttttttctctcccaaagtatgatgaacatggtttttatttctccgaggagggaagatgccttttttctccatgtttttctttttcattatcccctgtaaactttttttgatctcctatattttttcttcatccgtatcttatttttttccctcggtttataacaggttttttttacatgggatgaggtgaaaactaagcggttttttcttatgtggggtggggtgggaatgggaggaggacaagtccatttttaggcctgtttagtagggctccaactactaaatttaactcgggagtcgagcctggagtggagatgtaaagcaacataaacccagctccacttagtttattttgtaatagcactccagtctgcactactctccttttgggtggagctgaaaccttttggttgtgctccaccttcatgagaggagttgtggataccaaaagcccttaaagtagtagagaaactagagattatgtcttttaaacaatgacactagtcagtacccctacttgtttgtgtcgaatgagtaagggattgtttagatcactcccaaactatgccaaagattgccacaacttatgataggcaagtttaaccaagttagctcattgtttgcttcatggtcagacttgtggcaatattccctctcattttctcatgatcccacttgacatcaactcgagaaagtgtggcacactcttcttttgctagctaaagtgtgacttactttttattggccataacttagctaaagtgtgacacaaaagtatgacaatggtggcaatgttagtacaacattcaaacaacccctaaagctcagaaagaataaagtgattgaatggatcaccaaatgtaaagctctaaaatccgaggcccctttgaaacgcgattgtgaaaatacagggataggaaaaacatgtagaaataaaatgccatgctcattagattcctatgggatttcagaacacaagaaagtttcaaaactattaattggtacacatgaacacatcggaagcggaaaacaaggggaattggaaggaaacgattctttgtttcaaagggctctataagactatttcatatgtgataaaaatcctctagagttctttttttttcaaagggggcctcctatgattttcctttctttcaaagaggcttgatttataggaaaaacatataaatttggaggatttcaaccccataaaaaataattggaagatctttgaaataaaggattaaatcctatcattttctctgaaattcctatgaaatggacaaccctatgaagattttagaggaaagttagcaatagttccaacctcatggaaaattcctttgagtctatctttctcatatgattcacgtgttcttctatgatatattcaaacaatcattatttttttcttgtgttttacagccttctgttttgtccttgcatttctattaaaatcttgtgttttcatattcctccttttctttcaaacctgcatttcaaagaatcaatcataaattatatctttatctttaattccatatttgcaatatttagattccatctaacaccattcctatagtgttatctcattcacattgcatggatgatcaacttcgtttcacggttggtacgccattatttgcgctgtagcgattgcatgatgtcttggacttgttctagttgctagccatttcgttaacatcacatttgatcaaagcaagatatatcatttacattatggatttgtgacatgtaaaatccatatgggtctttatataatgtcaaatgatctaatctaacaactataggtctatcaagtagattacggcatgatgtttccatgacaaaatattttcgttgtttttttaattgattatgaaataatatatggcagaaaatttactccgcaagaaataagaatatagtttcacctaaagttaggtgtgttttaattatgattttgtgggttaattaaactatacacataggggtgataataatgctcggaggatcaagaagcatatactattacgaatcatgacctgggttaatcaatagttttgtagtttaaaagtatatgtattatgaatcacgcaatcccttcttcctataaagttatcccccactaactgcaattaagaccctaaagctcaatcctcaatgatccacgtcatcaacacttctcagccattggatcaatggatatgataacgtctcagccgttggatcagaaaaatgcagcacgctcaaatgaaaacagcccaaccatcttctctcacacagccaacccgtgaggcccatttagctaattcgatccaacacagcccaaccatcatctctcacacagccaccccaattcgatcatggcccattcaagaataaaggatttattagggttttgttggatcggtggggtcttatcctaacagagcaaaccatccacgccgcaatgcagtcgcgcaaccgtttctccctctcgcgccaacgccgcgctcgcttgccccctcctcttcggcccttcctctccctgccagcgcccgcctctcaatctctccctgcggccagcgctccacgagatcacgaccctttggttcgccccttgagagcgtggttattaccgagctattaaaatagggaagtccagtagtcggtgagatatgtaaccgatgtgcaacaccaagaagacaacatcatccgcggatttcacttctctggctatccaacaaatctcatcgaccatggccagactttcttttcttccagccgggagttcagagagcgagccatcggaagagtctgtcatggatttaattttgatcaccgcactcacgggattcatttgcagaagttcagggtctttttgtcatccagtctgtggctgcaagcctgaggctcagatgggaagtgaggttagttgttcaacaaaaaatattgtgccgtcttctgttgcccaactcatggtctgtagctagctcctaatgctgtgctatgtaatatgaccactctacgtttcttatgctgatctatattacttttatttttctatagggaaatcacttttatatcctctatatcaaagctgtaggcaagaagaaatcattcttattgagattgaattgtatttctctcttcattccatcaatggctatttggagaactatttcgatactgcaaaaattttctttctatatatgtgctacacaggaatgggttatggcagtttgtagaactatttggttaccgcaacaatttatcgaaggtatgattcatgtgtctcaaactcctcttccttaattatacaaagtcagctattctaagaaaataaaatatcatgagaatatttggttttttatctcaatgtccgcccattcaaaaggttcatggtcctcaatgtcggcccattcaaaaagtcttagagagcatgactctttagttcgattggtcagtcttaaaacaaagaaattagttttgtatgatagcaatcaagttcctttgataatcaattttaatattttactaatatgtttaccacaatcggtttacaaattttaatattattcacaagatttcctgctgcaacgcgcggggtctcatctagttcttaggaaaagtatgcactcatgattaggcttttctagatcatatttatgtggacttccaaataaagtgatatataaaaggtacacacttagtgaacatgattttaaaagcatcgtcaaggtgttgtcgtgaggcaaagtgttcaggacacatatccttccacacggttaggcgacccatatttcttcaaatagaggaatagggccacatggtggtctatatcacgcgcttgggatgaaaatcatgctgaattctgagggcgaggctatgggtcaaggttgcgtgaggagaaaattgctgttacgtgaggggcacaattagaagatgagataaggaaacaactgaaggtgcaattggaggaggaaataagaaaacaatagaagaaatcaattggaggaagaggtaaggaaacaatagaagataagcacctagaggctagaccttagtgacgatggcaacattcgtcttggtcttaccccctcttcttcgatgtatccacacttccttcttgggtagggcacaaataaatttatttgtgccctccatctccctgccagcacccttccttctaagagtcatcctgcaggctctctgtttgttgtgctctttcgctcatttgctcttcttcatatgttctgctatgctttttacactctctactgcttagggaagagagaatggtagatagatatgatgaagaattggtagcaagcttgggaaatgaaagaatgggaggcacaaggtatttaaaattggcagcaacaaggtatgtttatacaataaaatttaggaatatatgtaggttaggaataggttacacgtcgcctcgaatcacaccttgaacgtgaagcttgcccttgtcgcattgaataaagttttgtttctaaaacctacaaatggttgttgctgtagtttggagactagttttctatactgaagtaagattgaattttaagttcgtgggaaataggagcgatcataaccaaagtgcatacgtttaagcgtaattcgatcatgtacactcactttatttcggataacttgaaattgaaggtctattcctatattagtgagtcgactctacatatcagcacgttatagtaaaccctcaattttcaatctaaatgaggttgcatgatcaaatttctccgctttataagcataattgatatgtatatggatatacaattttgtttagataactacattggatttagacttgtcctagaaaaagtgttgagcgatttggggtttcgattgatgcatcattattcattagttgaaacatggtcctcttttaaggaaatgatagcaaacacatttttcagctaaataatgggtgcaaaattacaaagttcagaaaacagaaacaaaatcatcttcgaaattaaaaataagggaaagattgtaatcacccatctacattacattcaaccatgtattatgttgttttgtactacaacttatacagttcacaccagttctagttctacctgacgactgatcttacatacatgtatatagggcctgcttggttggtgccctgagtatcatgcctgaggaatttgcgtgcctgagaggcataggagaagttgatgaaacttgcctggcctggcggcctgacattctgcttgtttggttgtggatagttgcctgagaggaaaaaaatctttacgttttagatgggtactgctaaccataacaaaccaatttattgcccagcttttgatgtattaatcatttgcgtacgtcaagatggaaaaaagaacgaagaacacaagaaaaacaaaatcccaaatccacgcgtctggcagaacaccaacctaatgatttttgccggcttcacgtacataaagaaggggaaaaaatagaacaaaactgctgctatctgtgggagatcagatgggtcgcagatggaactgacgaatcgagatatttcaccgtagatttgtgtgacgccagccggatctggcaagatggtggtggcttcccacggcggaggcaatactacatgcgcgtgacgacggcggaggaaaattatacgtcagtaatcctcgctagctgctgcgcctggagctcaggcgactgaaataggtcgcttgactcaggctaatcacgcgcggagatgcatcaggccagcaaccaaacaaggccaaaaccgtgtaaggctcgtctcaggccaagctagttctcctcagggtagcaaccaaagggtagcaaccaaacagccccgtatactctgaatacagtactgtcgcaagcgtcgcttgtaccaattgctactcaggtaggaaaaaaaaaactgccacagtgggaaaaaaataataaaaaaccaggaagaaaaggccaccgctataaattatggctgtccgctagggttttccgccttcttatctcttcgctttccccctcatcgcggtcgtcgccccccgccgccgccacctcccaaaccctagctccccccgcgtccgccatggccgacgaccactactcctccaagcgcaagtacgacgacccctcgccgcccccgcgtcgcacgggcttctcctccgccccgccggccgcctccccgccctcgggcggcgcgccggcgtcgtacaacagcgtgcccccgccccccgccgacgagatccagctcgcgaagcagcgcgcgcaggcgatcgcggccaggctcttcaacgccgccgaggcgaagcgcccccgcctcgacgccggcggcgacgacgacgacgcgggcgccggggtgggttccctcggcagcagcggcggcggcggcggcggccgcgcgaccgggctcggcttctcgtcctcggccggtggcggtgagttcccccgcgccttctcgttaaacccttgttagatcgggagatcttgtttttgttttctcgtcgttagtggcaggctcgtagctgctgtgatgtggatttagttagggttttcctttgcttgaattactcttcgatttgtctcttggattacaagatctgtcagcctgagatgttacctgatttcaaccccttacgattaggcagtgagaagtatggtttacttttgttacagtctgcaagttagtaagctgcaagtactcgtgcacgatcccgcggtttacatgcagttacaccatggctttgttgatagcatgacgccttgtcatgtgcagatgaggatttaccatagtatctacctgcatatagttaataatgctgttctagtgttgtaggaaaacttcatcgggcagaattatgtgttaaactgttgttgcttgtcacgttctgtggttatgtggatgctgcagcgcgatctgtttgtgttatcatgattgtcaccattatactctgcctcctttttcgtaaaaatggtatatgggatattcaactgtaccacattcactttaccatggtatcgattacctttttatgattgtattatttccttctattgaagtacccctatgtctattgtttcatttaaattgtttgtttacttcacttttattatggatttacccatctacgtgctgcctgttatatcagggcacggatctgctatcccatctttatcttctcatggcagcacacctcagtactcctcatatggtggataccagggtacaagcaaaacaattgaaatcccaaatggaagggtaggctttcttagatttacctgttccaatgactaacttttttgtgatggaatgaatttcacatcaactggtcttgctaacaagtctggtggcctaatgcaggttggtgttatcattggaaagtcgggagaaactataaagaatctccaacttcagtcaggagctaagatccaagtgacaagagaccttgatgctctacctggctcacagacaagacctgttgaactttcaggcactcctgatcagataagcagagctgagcaattgatcaatgaggtcctggcagaggtaatcctgttacgctcgtggctttccttttaccattttagggatgacttgacattagctgaacatcttgttcgatggccatacttattattcatgtaacctcttctgcaggctgatgctgcttcatctggtaatctctctagccgaaagtacaatgctcctcaaccaggcgctgatcaattccaaatgaaaatagctaacaataaggtaatccacttttctgaattaaagttagcttgatgctattgaaaaaaaatcacagttctgctaaaaatacaatgaggatgagggtctcggtgacaattccacatctgacgtaataattttgtttatttcaggttggtctggttattggaaagggtggtgagactataaaatccatgcaagccaaatctggtgctcgtatacaggtctgtgttcttgccctgcaaattcacgctttaggcaagggcgttcatgacatggcactattgtttttgttataatacttttttttctgcattgtaattttgttggctaagactaccgaaatgacacacatgcttgcctgtttgcatatgaaatatctgaagcatgcttactatatgaactggttgcttccagcatttctataccttttatgttctcatgtgcacatttgcaggttgtccctttgcatttaccccctggtgatcctgcaaccgaaagaacagtgtatattgatggtacacaagagcaaattgaaactgcaaagcaattggtgattgaggttaccagtgaggtccgcttttatcccttgtcatatttgttgcctgatttcatgattgctatgccaatttgcgacttatctgtggtgttaaaacaattctgccttcttattttttttggttaattttggatccttatgttttatccttcccccctaattggccttcctttctttacttgttctttttaaaagaaacatttgccttacttttgcttctgtgatggcctatggttctctgacaataatgttcatgacatctttatgtacacatattagtcatggactcagggtatgccgtcaacatgctcccacacatgagggtgccatactatctttctaatacacacacagtttccaatatccgatgcacaaactgatttataattttttttgtcttcatagctgctctattgattctcattattttaaatgtgtacagttaaaataatcttctaactattgatgcaaaaatctccattataccctaatagtactcttggatcaatgttctgatttgttagctacatattgtgtgtgcttggtgctgcctattcaactctgaactatattcttatattgattctctcaattaatgtatatatttcccatctccaactatatttttatattgattctctcaacataatactgtccataccttggtatgtggcacacacatctacactggagaccaggtttgttatggcataaattttcatattcgggatcctgcttgatagaagattaatttttaactaatagtttggatatctgtttgtgatctaacctcatatacctggtctcgtataacttttaagttgggctggtcccttatctcttttgtggatagtttgtatacattgctttactcaagtgaaatacatgggtggtgtacatatgtttgcaggttgtgcaatttaggtgcaggtatttaggctacagttttgttttgctgttttagtactctatatatatcacttctggcgcctttgccttgcgcactatttgatgcttaattctcggtatggatgggcgctggtcactacatgtcaactcactctagttcaatcaaatgaactagtgggccgattggtactcacatagtgacccgtgtccatccctaattcgcagcccatgatatttgctctcttcaagttgggagtagcatgtaattcgaacttgatgttactctaataataaccctgaaaatctatatagttcaaacttagattcatgtaacaagggcacgttggattccttatttgtttatttctcgtctatattttctcctctgtgaacttgcaggttaccatacctaagctgttagaaaactgcaaaatatttctcctttgtttataccatattcttggaggagaccatggacaaaagaaattattggtgcttatctgttttgattatcaatgaaatagatattttacttagttgagtagtataatcacttatcagtcaattatttttgacctgtcaacatatataaactgcatggcactcttctattgctattcaatatatatgttcgtctagatgtccaatcttctttagcccccatagttttgcacatgggagacgatagatgggcatcagcaatgttgcttgagaatattgatctcggtgagttttgctccctctatttttcttggtggttctggaatttctgtatgttactttgctttggatttgtatatgtttgtctgtcttttgcactgctgttctgcatggtttgtcgtatattattttgttgtatatacatatacagatgtgcaaactatatttttgcagaatcgtgctagaaacccaatgtcaggtggctattctcagcagggctatcgccctcctcgtcctcagtcaaattggggtccgcatgggggggcaccgatgcaacagcctggttatggttacatgcagcctggagcctatcctggggcacccccacaatatggcgctcctcagcaaccttatggtagctaccctccagcatctgggggttatcagactgggtgggatcaatcatcaaatcagcaatctcagcaggccccccctggcacgggctatgattattacaatcaacagcagcaacctcaacagcaacaatctgcccctgggactgctgcacctggtgatgctactagctataattccagccagcctcctgcatatgcttcccaagggtatgattcgtcctacgctcagcagagtggtgggcagcagcaggcatatgattattctagttattatcagacccaagggcagcagcagggctactctcagcagactggatatgatcagcagggctatggaacttctggctatgggtccgccgctaattcaactcaggatgggtccgcaccaagctatggtgctcaaggtgtagctggtcaagcatctcctgggcagcaaacttcaactcctgctgctggaagccaccctggctattcaagccaaccacctactagcgctgcttcaagctacccggtgcaagggtctgctcctcagtctggatatggggcgccaccaccacagactggctatggtacccagccccaaccacagggagggtatagtcagggcagctatggcgcacctccgcagggacagaaggctcctcctaacacttctccttacggacaggcgccgcctcctggatctgctcctggtgggtatggccagtatggttactctcagaaccagcaaggctatggcgcacctccaccttaccctggtgcacctgctgcaagccacccaggctatggtcagcagcagtcctatggtgatccttatggcagtggaagctacgggcagcctgccgcatattctactgaagctacaactgctgctgcctcccaggaccaatctgcttccgcccctgcgactggtgctgcgcctgcgacaaccgctgctccggcacctactgctcctgagaacagtggagcccaaagccctgctagttaaacctgcaactcaagctttaagcttcttttagagaggggtttccggatttatgtgttgaaattgttttttgttgctccttaatgttgacttgttttaaatatagactgttattattgtttagtattgcgttatgttatgttacttttgatacatatgcaggcttgactgtgtgcttaatgtgccgtgttactgccatgtaagctggacgttatatccaaatctgagccctacttttgcaatagttgtctggtctaatatttcttgcggtgggttggattgatatcgattgtttttgtatggaaattttaagttatgttttgttaggtgtgtttcgtgtaaaaagcaccgccatcccgaaatcctatttcagcgccaattcatcatcatctctgttttctactcggacacaagctatatcccagaaagtttccaatcctaccccaattcattattcgaaacctcgctccacttcaatttaattcatcattctaataatttatttactggattcctaattttctgacgaaatcgaagttagttattataccccgtatgtaaaccagtagcgtagacgcgacgattctgaactcccccatcacatctccggcaatggcggcggcggcggcggcggcgcccccctcctcctcgtcgctcgcgccccccgaggtgcccatggagctgcacgccggcaaccgcgatcgcctcgtcgccgcgctccgcgcccacctctccgcctccggccgccccctccgcggcctcgtcctcctccaggtccagctcccgtttcgcctcttttgttgttgtattccccttttttcccggagggtttcctgaagggctttttccggcgatgttgaacccttcgtcttctccagggaggggaggagcagacgcggtactgcaccgatcacctcgagctcttcaggtagttagctgctgccctgaactcactcaagtccgtgttgttactgcattattgtatttctgtttcatgggacaatcagattgggaggttgagtggagatcgagtggaaaacctggattgattttttttttttaacaggcaggagagctactttgcttatctcttcggagtgagggaaccggggttctatggcgcaatcgtgagtttctcttgttcctcttgctgttgctcggtggactaacctttcattattttcctgcgactatttggtcctgatatatttgttcatgaattatgaatatatacatgcttggaagatggcattgtccctgtggttattggcatggtgtgtgtaggtgaatttttcgggacttgttcttgcgtagaaatggtagagctcctcaatatataggtgaaatgtttctatgaatgtatatgtactcacctcgctgttagtgtaatttaatttggtgctcatggggttaactcactgttccatcctgcttagtggtttgttcactttctgcatattagttagaaccacgggaaaatgttaggatagattggtggttggttcaaatcatttcacttgtcttcctacacaatcatgcttataaggcaaagatccgtgacaattattgcgaatcgttttgtttctaagagctttttgacagtgtggcaacaagcccctgctactgcaggttattctgcatagttatatgatactggttatttgatatgacgtgtcctaactgagtcttttgttgttctgaaaggacattgtctctggacagtcaattttgttctctccaaggttgccagctgattatgctgtgtggatgggtgaaattaagccattgtcttattttaaggtatttgatcttctagataccacattttgcattttctgctaaagtttgaagtttgaactagcatctttgcatgaatctatacaggataggtacaaggtcgacatggtgttctatgttgatgagatcacacaagttctgcaggaccgtttcagcgatcatggaaagcctcttctgtttgtgttatatggaaaaaatacagacagcggaaattattcaaagcctgctagttttgaggtacttaaaatattaatgtatgcatcgttaacattaattttgtatttgtaaaatactgtagattgaaagcataatcaggcatgttgctcttgcaatactgttttctttattgtcttcaatttagtctcaaacaagatccatttccttcttatgatcttcgacttattctccaagaagatcaagatccatttgtgtattatgatatgtgtaatctatcaaggcactcagtttctctcacacttctctgctcacattgtgcattcaggttacaatgttaatttttttttcttcctgtttttgccaggggatggagaagttcgattccgatctaagtacacttcaccctattttaactgaatgccgtgttatcaaatctgacatggagcttgcccttattcagtatgctaatgatgtgagctctgaagctcacattgaggtaactacggataccgcttaatgtagtttattttttcttttccttttctttaaaagggatcatatagaagcagacaaatacttgtaaggttacaagaatgagaaaaatatgatatgcatcagtcagtcctaccacaccaggtcctaacgcatcaagcaaagtgcaatgctaataaagttataatactgggacccactatctgattcaattcataagaacatatgtttggcatttaggtaattataattacttattgagatgcaaattatattgctgcacgtatttacttgcacttcacaaggtcatgagacgagcaaaaccaggcatgaaggaataccagttagaaagcatctttcttcatcatgtttatatgtatgggggctgtcgacattgctcttatacatgtatatgcgctactggagaaaataggtgagtgctcctgttgcgaagcaaatgcctatatatggactgattggtatctttaaacggtttttcacccacttttgagtatagttcaatatgtataagccgaatagtaaaggaaggatgatagaatcctagatccattatccactgttattttgcatgctatttcctttcaaagttgggacagtaatgtataaagtattctgataccatgatcttctagtggaagaggtagcaatttttgcaatagagtaaccttagttctataaataagagtactcatttcaacattgatgtgtcagtagggtctctcttttaccagcattcagatcgaagctggtaactacctatttttggacttatttcgatacaaatgactatgtagacgtatatcaggtccaaatgtgacattctgaatgtgttctaagttcactactctgtcctaagtctgcatctcagatattcatagttgagttggttgaactatctggtgttttaactcttctgcctgttgtgcagttctgttcttcattatggacatgctgcagcaccaaatgacagggtactcttttacgaaactatgcgactgttgttaatgtttgtgtgctatttatttacttgttatacccaccaccaagcaaagcttaacttgtccaaagtggcaaagcgctcaaacctcttatgatcatgctgccagctaattgaaaatggggatgatttgttttaatttcaagacagtagagttcacctaccttgttcatcatcagctacagtttattaagtaccaatgtaccatggggtcttgtagtattggaagaaagagcaactttctcttctctagctgatgtcactattcgtagcaaacttggaggttatctaatggaagcagccaatagaacgagttgttctggtgctttatttagtcgataactaggtggtatatcagtgtatgagtgtctgctatgccacctctttataccgagttagctataaattgaatgttcattctcttcaatgaagtatgtgaatgtgaatatgtggtggtgtagttgtcctacggggactatgaaacgctagaccatgcagtcaatgatttaagctactatgcaggtccacattactagctagcaggaaaaaaactgcaacttaaattatccttttttttccagaccctgaatgatggagacatggcactaatggacatgggaggtgaataccattgctatggatccgatataacatgctcataccctgtaagtgttttggaatatccagacatctactttgatagatattttgttccaacttgcaatgtattagaactgcttttttgttatttattgttgaaatctgtgacaacagtgtacctgtgctagaaacatgtaccaatagatgtaagctataattatatttgatgctaacatatggatgatattgttcttacaaaatgtccggcaattgaaagaggtcctttttcttagtcctatatatagtctcttgtgttatatagcaaatttgatttcttactttttatttttaagaataattttaggtattttttttacttgtcttagtaatcatgaaaagagagctcagcgatgaaaataacaagataacccctaaattaatcttgaacccaaactctaaaaattattttcgaagatcggtcaagcaaaggcttgtctatgctgctatctgactatgcgttatttctttcttaattgcgtgtagtttgttggagttatatgagatgatgttcatttctgttttccattctatgttagtttgcttctgacatttccttgaccattggctatttaccgcccccccccacccccccccccacccccgcgcgcgcttgcttttcctgggagtcttttgtctccaccttgtttagtcatccttattagtttttatcatcacatgccatgggtatctgttggatgtatgtgtccagttcaatagtatctagctgccctgagcttttttccccatccaatattatctagtttcatcgtggtgctattcccatattctctcaattcaattctgatgcatatttgtcttatgattccttttgatatatatactttagctgactttgggcaattggcttatagctgacttgaataaagtctagaatctagattgatgcatagccttataactctagaatctagattgatgcattactttttagcataactttgatcaaaaccacacaattgtctctttgtcttgttctgtctattgatatgatctaagtgagtctatatatttcagataaatgggaaattcaacagcaatcagacaatagtatacaatgtgagtactgataaaaatcattttctttcttcctgatatatttcttgcctggctgttcttttttatcttttgcaggcttcgttaggctactatcctcatataaagagttcttcatgtgaattgaacttatatgcatagcaccatctttatatgagattatctgtgttttacaggctgtccttaaggctcataatgctgtcatagcacacatgcggcctggagtaaattggttggatatgcacaagtaagaatgcactattgcaatttaaaaaccatgcattttaaacacgtcctttatgaagttctgttaatgagtgagttcaattatgatgcaactttcaatgcatggaactttattcaatccatctaatccaggaatatttgcaatgcaacttcaatgcatggaactttattctatccatctaatctaggaatatttgcagttgaattatgcaatttatcatgttgatttatgcaaaattgaattgttttcccctgtttgttcaagcataatttgatggtatttgcagacttgcggagcagactatacttgaatctctcaagaacgaaagaattctccatgggtgtgtatgcttgcattcattgtactgaattactggttgaacatcagcctgcaaagcttatgcctgtgatgttgatttttgctggtgttttatccttggtcatcatttgttcagggatgtcactgatatgatggctcaaaggttgggtgctgttttcatgcctcatggtcttggacacttgcttggtattgacacccatgatcctgggggctatcctgaggttattttaatacatactttatgccatgaattatctttgagcatagctttatagttctaaattgctcccttcttttaactgagatgaatgtccttttttcttggcttttaactgagatggacgtcttttttcattgatttcagggcttagagaggccaaaggagccaggactgagctccttgcggaccataagagaacttaaagaaggcatggttagtacctgcttttctgattaatttctgaagatttagcataaaaaaatcttctatttttttctgttaactgtgtgtgctttgtcgcgaatgcgacattaatcaatttagttccttgactgtttaagactacattttctttttaggcattctggtaacgttttacctttttcagattttgagaattccaacctgattcttttcattatcccatttatgttgcgtctgattactcatgaccgatttatttgctttgttatctgtagaattctgcaatattgggaacttgttcccacttcatttcttgtcaaattcttcataaacaagttactttattgtagacatcaggctcctgagatccattttccttcatgtctctcttgaaatgagatgatataatgaccttaatgggttcttcgtaaatgataatattttagtgcaaactgttcaaggtgcttcagtatatatctcctatctgacaacgtagctggaacttaaacccccctttttatctctgaaattgcggagataaatgaagggaaaaaaacgtttgtgtaaaaatggtactaccactgtcatcctccaccctagaactttgtgatccttgctgagaagggtctggaccgtgggtgccctatctttttttcttttttaggcagggtgccctatctatagcaacaataaacgtttgagctctttatggtatgtgtgttgcaggttatcacagttgagccaggttgctatttcattgatgctttgctgataccagccagggatgatccagtttcctcgaagttcttcaactgggaagagattgaaaaatacaaaagctttggtggtgttcggattgagagtgacgtggtatgtctatatttccctgttctacataactaaactagtactttaagaggatcatgcaagcatgctctctttaatgctagtgctagtaccaggtgcaacagtacttgtaacaactaacttccggagagtagttactaaatctcagttggacctttgaaactatgattacgatttacgagtcacataaaatggatcgaatgtattgtggtagtgtccttgatgaggcaaactgtcttgcattagctggatggcatagaaggaaaaagatactaggactataagataaaaaaaatagtttctcttacaacacgagagactaatggatcatttcaggcggtgactgcctcacatcacattgatggatcagagtgcaatagcttattgacaacaatcatgcttgatttgaataactagagttagatctaggaaactaagaatccactgctgactttaccaacagcttccttgagatgtatatgctgattgtaatgcattttagatttttatttagtttcaagcttttagacgtaatattgaagattttcttacaacttgatgaagatgttctactttttgtggttaagctggagatgctttgacatgctccaccacctttacagctatcttgttattattccttgtgaacctcaaggaattcgataagcatattagacaaatgttgacccttgtcctgccaagtctgagtagacaatgacacaagttctacaaatcttatttcccacttaatatctgtcgtgttattcatagtgaaacacaaggaaatcaataagcatatatttaatgatgtctacaatagtggcacctgctctgtaaagtttgaatagacgttggtataaattcctcgaatcttgtttccctactaaatcagtcatacctcaaaaacagcacaaattcctgtgcgcacgcatttgatactctattttggtgttgacttcatctctttctctagtgagaattactgcaatcaaatttatctttttatgctttagcccttgttagaatgctaaacttaatcttgactattaacatcataattatgttgtttccagtatgtgacggcgcatggatgcaagaacctgacaaactgccccagggagacctgggaaatcgaagctgtaatggctggtgcgccatggcctgtgcgtgcgacaaataatagcctgtccaaagcgtcctgaccaccttacctcagtttttcagtgctcctgaaccctgtccaagcagatacatatggagataaaaataggtgaacctcctggggttgttggtctgatgttcatcggtcatttcatatgttaaattgtaggatctgttgaagacggtcccctcgagtatcgtcctttgaaaactgaaaggtacaaataaaagatcaagaaaactgaaaagtacaataaaaagatcagcttgagaggaaaagatgccgttcaatttccttgcgattagttcaaacgtctctgttcataaccatcaactctattggcatgagaacagcatgaggtgcataatcatgcaacacttgttttgtgcaatcacaggactaatgtggtatcattaaaatgtcttgcttcattctacaatctagtcggtttcagttttatttatgttattaaaaaaaatttgtttatgtttttttccctttaaatgtatattttttagtttgtttaggcagggatgtacatcaacttgtcataacttaaatgaagcattattatgtttggtaatggccatgctaatttataaataccacacttgaagaatttggcaaataaatgaacactaaccttcacctaccttaagagttggtgagttggcattttgctgcttattcggcatgtacctgctgatataaaaaactgtgccaactttttttgacataaaaaattgtgctaactcagcacaagatgctcaattagccttattttgttgagcagttaacagcatcatggttgggttcgaatgcagatttttctgtacattattttgtacagttttttttttgtatgatagattagtgatatactccatatctgaagcaaaactgtgtctttcgcatcttttacagctgttttagggggtattgcttccttttctacggcagtttggcaagttaactcttttgcagttctaaattttgttatttcttgtatactattatgctctccatttttgttgtccgatgactttcattgaacctgcaatacatgcacggcgaagattgaaacattgcacttggactaaattgtaatttgcaactaatttcacattacataccttcccttctacacatgcatggaagaagcttatacttcagcttaaaacaacaaccatgtatatacttctttgcactgctaaacaagttggtaaactggcaaaatctgacgaagcttctcgaacagggtaaaataaaggaaaaagtacgaattaccccccaacaaccgcgacagtacgaattacccatccgaacctcaaaaccggatatttgataccctaaactattgaaaccggacaaattacccccctaacttgatttgaagcggttttcagcctacgtggcacacacgtggcgatacagtcagcaaaaacaaataaaaacaggtggagcccacctgtcatttttttctctcctctcccttctctctctctcggtcaacacaggctacggctggcgggcggcgggcggccgaggagccgacgccgacgggcggcaggcgggcgaggaccgaggagccgacgccgacgggcggccggcgggcgggcgcggaggcggcggcaggcgaggagcggacgccgatgggcggccggcggcggggatggctgcgggcggtgggcgttgcgggggcggaggccgaaggcgggcgggcgcggagaccaaggccggcggcggcctgagcaagctgcgccgatcctccatcccgcgagggtggtgatggcgcaatgcggcccacgacggcgactatggcgagcggcctcccccctctctctgtctctctgcggccacatggctgacgccgccgcacctgtacctcgtcatcaacgccatcatcctgtccatcgcggcgtcgtcgcggttctagcctaaccgctcgcagaccgcctagggccgatgcgtcgttggtgcggccggctccggttcctgttctagtgccggtggtggcggtgcccgcgccggtggtgacgatgccgatggaggtgcccgttgtgccggtgccggcgccggaggtgatggctcccgagcccattcccgtggaggtgatggtgccggaggtgggggaggccgctcgccgtagtcgccatcatgggccgcgccgcgcgccatcaccacccccgcaacgcccaccgccggcctggcgccttgccgcagttgccgccgctcgccatagtcgccgcaactggacagacgacggcggcgccaccctgcttagctcgcgggatggaggatcggcgcagcctgctcaggccgccgccggcctcggcctccgcgcccgctcgccttcggcctccgcccctgcaacgcctaccatccgcagccatccccgccgccggctgcccatcggcgtccgctcctcgcccgccgccgcctccgcgcctgcccgccggccgcccgtcggcgtcggctcctcggtcctcgcccgcccgccgcccgccagccgcagcatgtgttgactgagagagaagggagagaaggagagaaaaaactgacaagtgggccccacatgtttttatttgtttttgctgactgtatcgtcacgtgtgtgccacgtaggctaaaaaccgcttcaaatcgagttatggggggtaatttgtccggtttcaatagtttagggtatcaaatgtccggttttgaggttcggggggggggtaattcgtactgtcgcgattgttcaggggggtaatttgtactttttcctaaaataaatggatggcttctgctctagacaagctgccctactacctctgttccaaaatgttgcatccaggatgggattagattcatcctaatataacgaatattaatagaggtaatccagattctttataatcatagttattaagaccggtctggaccggtggttggaccggggaaaagcggaatcagcgcctccatcggtctggttcggataaaagatgttacaaacttataataatgatgtgaattttcttcagagcaaagacattttccagttgtctgcatttggctgcaacagattaaagaaatatggattgaagacggaactgaaaaagctcagacagaagggttgcttgtattgttgtgaacaaattccttgttctttctgcatctctcaacacatgtggccttccatgaaagcagccatgagcccatactactatacaagttgcttgtatcagtacgggtttctcttctcttctggcggctatgtttggtgaactgaacccatttcaatgcttattataaaaattatggcaaacctggtggcacccatgccgttcatttaccaatgaactccattttgtatatttcattctcacattgcgaaaccctacccgatctttcaatcagtggaattgagtggagcaaggcatcctagcttttagataatcgtgattcttttgttagattttaatacacttagacatgtacgtatcttggctaaactcgaactatagttgatttaatactgatgtactcggtaaagaataaaaaggtacttgaagacaacttcgaatgggaggaggttttctttttaccctcctaaccgcctgtgactttattattgctaggtatgatattggcttaaagacatagcattgaaagagtgagtaatcaacatgaaatccagtctccttgtaaattcgattagacgactgaaaccaaagtctctggggagaagagttagacagatctagtagtaatatgtattgttttctcctcaaaagaaaaagcacttgccctcctttgaaatgcagaattttataggaaattcatggaattagttcatgaaattctcgcaggaatcttccaaattcgtgtgttcgaaaggaatcctatactcctatatattttcaaagtgcatttgggcccatttgagtagctaaaattgatggataatttgatttttgtggtagctatttgagggtataaatgaataaattaactactacaaagttaaaagttactctagaaaagtattccaaatgaagtttacatagaaaatttatacaagaaattcactgttttaggagcttgggaagtgtgcaaacgaaaatccaaaatctagaactagaaagaaaaagggtccatggtattattgggagctaattgcagatattttattagccttaaactccatttattgtttttatatgattgggaattagtcaagcattttggaggctccacgagccaattatgtatcatggcgccatggttagttcatacatcgctacataaattgagaaatctcattcgtttattatgtagacatgattattatggccaagtacacgttcatgtatctacatcaaagagaggtaccattacaaggacaagattaataattcggattcggcgagttcttcttttctccagctgtcctcttggcccctagtgatcaggtttctcaactctaatgcctccatggttgaaacttatttgtattcttgtgtgatttctcttacttctctaacgaacctctccttttcacacaagtggccaaacgccatgctgctaactcccccagaatggggcctctccaaattaaggagaatattcattggcaggtgatccaattcctctttgaccacatgattaattattatgtgttgaaattttaagggctccattggccatgtttagtttagattattgaggtgtcgcgaatttagattattggccatgctaaatcaaatattttttaaaataaaattaataaatagcttaaaacaagtggtcatacatgagaagaaagttttttaagaattttataagcgtggagcaaataatcctgatgaataagatagaaaagaacatgaccttagtggtttataagtatttcagtatttcacaggaaattgtatggtgaggaatgaaaatcagggaaaaaaagtagtgttctaaacaatctctgagcaaataatcacaattgcaagtttgagagctagagagatattttagtcggaagcgtagcttgatggtttgtaatagaagtccatttctcgccgcaaattgcgcttttaaaagtccttatcgttagaagtatttaattttaattttgttagggttttatgtgctgatgggttagtggagtaaacaataagttgaaatggactaatatcttacttattttagtcaggaaataagggagaaatcttattggttccacatcagttaggccatgtaagaaactaatattcataggaattatatggtgacaatgttgtgtaaatccaatttcttgacctccctgttctatatatggattgcgacatgacatggatgttttaacttgtagtaggtaatgctgaattgtagagacaagcttaactcccattgtttattaattttttttatctaatgccgtttcattagggaaaaaaacttaggacaaaaaaaatgtagtattttatggtggctaacttgatccatatgttcaattgagctgtggtatccacttgataataataattcgtaaggcaatagcagggcaccaattttttttattttttttgcgacatgccaaattgtgtgccacaaattcatatgcattttctatatgcctttttccaaaatagttgcatcttgagagtatgccaatttaggacaggctggcaagtaaggactaaggtgttataatgcaaacagaattctgtgatacatcattgttgactactaatgtgtattagcacgttacgttgacacatgtgttgtacaaaataagtttgcttcattgacatattttgtacacaaccactccttaaaacatggaaaaaaggaagtggtatgctctcaatgtgtaaatctttatatatttttttcatgaactaaattgtttcctatcaaagcactacaatattttcctccaatttgagataatgaggggcaaataagggattgggttaattttcaagggtaactagtattttattcataaagagataaatcgtgaatatcttgacattgctaaaacagatgaatacaagttttttttattgcacacgtccattgtaattttgtacattgaggacttgacaaatttgacatgattcttttctctcttttatttagggcaatttgtcatgattctatagggttaacctttgtacatgattctaaaaaaatgcatgattttttttctgtggaaatcttgcattgaaaacataccctaattatgcatacaaaccaaagcaaaatgcaaattacatagaacccatttcatctgcctttccatctggtacatcatcctggcctgacacacaatacacatgaaagcaacatttggtttcctctccttttccctttctaaaagaaaagtgtgacagtaacactgaaagagattgcctcacctaaaagaaaaaaaaagaggcatgagagaagaaaaatatgtgattttgtttttgaagttcgcagatagtgactaaagtacacaagggttccttctcctgtgccaaccaatccagctacctcatctttgtacaacacaccaatgattagttttgcaactcagtgctttttatccaagagatactaaataacttaaaattaagctctcttttgctgtgtatataaatagtatggtaatatgatactggcataccactgttccaattatataatcctccgtttcaaaatatagtaacatatatagtactcggaatagaagagtttaattaggtggtgagatagaacaatacataaatacatatattttttaatttcatcctgaaatgccagaacctcacaatccaagagaaacagtggaagcaagatattgttatcaatgacattatataatgtgatcacaactaacattttcacctgcagcctgcaggcacctgttcttgttcatcagctgctctcccccttttttttcccctaactttaattaatttacatcatggcatttgaccttaagatagcgtcggccaatgccaagcggccacacttcgcacgcttcgatccaaccacatgattatatgtatgctacacgattaaggataggctaatataattagcatgagctacttcgtagtacagtagtataatgagaagcattcattcgatcgatcatctgaaatgtaagggacaattgattatttgaccccgttttgaagtctaactaccaatttaaccctactttttttagtttgtttatttgaccctgcttttcaaaaacgaatcttccgtctgaccctacttccactacaccgttaagatttgattttaaaaaaggaaaaaaatataattaaaattcataatgcccaaaatacccttgaggaaaccatatccatctctagccctatccacatgtctctgagtctccatgtctctctcttctgctagcgatttgcggcggcggcgacagcacgcggcgaagggagggaggggagccgggcctggcggcggcggcgtcgacgcgcgcagtggggatggaggcggaggccagcatgcggcgcagggagggagaggagccgggcctggcggcggcggcggtgtctgcatcggcgcgcggggagggaggcggaggccggtgccagcgaagggaggggagctgggcctggcggcagaggcggcgccggcggcatctgaatcggcgcgcggggagggaggcggaggcctgcgccggcgtagggagggaggcggcgggatgcgctcggaggggaggcggatccacgccggcatcagcttgtggaggtaggggccgggcggcgacggcggcggcgggattcgcgcggaggggaggcggatccgcgctggcgtcagcttgtggatgtaggggggcggcggcggcggcggtatgcgcgcggaggggacatgcgccagcgcctgctcgccaaggcccccactgccgccgatgacgatggccccgccgatgtccctggcctcgtcgcccgctgactcgtcggctgcggtgccaagccccgccaatgcaagcgccaggatggccccgtgcagcgagctcacgcccgcactcgcgcccgccgtggccgggaagagcatcgtcgtcgccgtctccgcctccgtcagcttcgttgccatcgccggtcgtcagcttcgttgcaagggcaaaatagactatttacccctaacttaacaccgtcaactcaccttaacggaacagggtcagaccgatcgttcgttttcgaaaagcagggtcaaataagcaaactcaaaaaaaaaaggtcaaattggtagttagccttcaaaacagggtcaaataagcaaatgtcccgaaatgtaatgtaaggacagttggagtagcaattgattaattaatgaactgaattgatggagctcttgacacatggcctcgcttgcaagtttcggatcgctccagaagactacaccctccaatttcatactccctctatctactagtcatatttttaaatctgaaaaaattatttttatagatatatttcaattcaacaatctatcatcttaatgactttctcagatttaatacatgactcttcattgtctacatggacatcgagaaatgtaaatattaatgaatcgtttgtttacgaggaatgactagtagcatgtttaaataggtgataagtagaattacttatccttgatctatgagtcaagatgaaatataactatcaaaagtagatggatggagtaattcttaaatgttctacacaataacacagtctccaaaatatatatctttgatcttgtttatctattataatatacacaataaataaatgcatgtttactttttattataatattcttctagttcctttaaaaaatgatttttaatatattggtagccaaagttataaaatgttaaccttaatcttatccaatacatcaagaattatagaattgaagggagtagaagataatactccattcgttcttaaataataagtatagttttagctagtcaaacacatataataagcaagagattcaaaggttattttgccattcattaatacatagtaaataataagagaaaaggggataaaaatattacaaagactcaatagctaaaaactagaaggaaaaaaaaaggataaaatagtattaaagaggtctattagacaatagactatatatatttagtaccccgccataatataaggtgcacactcattttaagatttcaacttttaaaatatttaaccaacacttagtataatatgaaattaattttatttattaaaaatatatcatatagttagattgagatttaaatttactttcatatggttataattttttttctacaaatcttatagtatatgagaaattgtaagctaaaaattagttttggagaccgtacaactttgaccgcgtcttatattatgtgatagaaagagtaacaaaataatgttgaaactaaaactatttttatttatgcacggagggaggatgcaattagcgttaattacacgtgcatatctctctcttgatccttccctctcaattatgctttgctgagtaataaaggaagctgcgcatagctttgcaaatccacttttgtcttgcgggcggccctgcacggctatgataactacctcctcatttccaaacacctttgttgttgaaaactatttacattaatctaaactttaaaaaattatggctgtatcaaagtgttgcatcttaaatgtaagcaagcttttgttcgtgatagtctaacctaaaaaatggtaatagtcaaagttcaaataatgctgataaaaaaaatcaaatatttgcgaacggatggagttatcttggtgtaagagctgttctcgtctcagttaagcgtttgctatttcaatgtcaatgcggtatccaaaatacaaatcaatcttgctttagtttatgatatattatttctgaaattgttttgagtctttagaagggcttccatcacagcttataagctgccaacaaaatttaaattctcaaacttaattttaaagtaatcgaggtttattttttagcattagttttaaaattgctaagtacacaaataaaaaaaatactcacaaattattaatttttctaataaaccgtacgtcttagaataaagcatatggcaaaccaatgggaaaaaatatagagatgttttgagaaaataactcaacctattaaccaccaagactagttgcgattagtgggatgatttggatcaattgttaattttttttacaatgctattcttctttagaaatcaaaatttcaaagttggatggtttttatagaaggagaggtttttaggtagcagtagagaaatatatggttttacgttagtattaaacccagtatgtgacactcagactatttttttttaaaaaataaatgtacagtttttgcaactgcaatatagaaccacaaataagtttttttctaaaatttgttgatcaaatgacattaaaatagtattttcaataactattttgacaaaaagataaatgatactctaatctcacacctagtggcctgtagcttactccctccatccctctcatcaggtctgtttggaggagtttaagattataagaagcagctgatgagaagctagctggtggaaaaactgggaaactcaacttctgccttatagtttattttctggattctataactatatattcttagaatctgaatgaaaatcggaactgctttgggatgaaaatctagacagtttctagccgttggagattttagtagaaactgcagctatcaaagctccccaaatagacccatcaaaatgcatcccatttaaatttccaccgttctattctcactatccttctatttcttattcaaacaagggactctatagtagtctttaatttcacggaccttaatttaaactaaacgatactctctccatctacttttgatagccatatgtcatcttaacacacagatcaaaaataagtaattctacttatcattcatttaagcatgctactagttatttctcgtaaacaagtgattaattaatatttacatttctcgatgcccatgtagtcaatcttgtgtgaaagaatgaagagtgacgcattgaattagagaaaattattaagagaatatgttgttagattgaaatatgcttatcaaaaattttatttttcagatttaaaaatatatctattaaaaggagatgaatgagtatataccacttccttaaaatctcgtttgctacccggctaccccaaatattaccgtcagtctagcagtaaatccgcacaatttttactattccggttccggagaatattcccagcctcccagggtctcaggtctctgcggaaattacagctttgtccctcgcatccacgtttgcgggcatttaatgcagcacgacggaaaacgtgggcccgggcaggccagtctgccacgcgtaccctcgctcgcttgacacagacaggtgggccccacgggtgagcaggcgtggcccacgtgtcgcagcggccgatccttgccgacacctaggcgcgaggggcccccgttacaacgtgtaggaggccaatgggattccgccacgtggacggagagccaacggtcacctggtgggccccacgtggagacccgagacgagccggatgcggatgacacgtgagccccactgtgcagaggtcgccgcgaccgcgaggccgtctgctcggggagcggggttgacgtggctggatctggagccgtccgatcggggggagccaacggttgggattgattcgttgggtggatgcggtcatcggcgagcgaagcgtcggtgtcgccagtctcctctcgtcggtggccggtgaacggagcaattttttttcacattggcccttgagggtctccaaaattacatgaattgttgagcatttcagcgtctaataccactgtcaatctctctgatcgagtgtttcggcaccattgtcgcactattactccatattttcttgatacgaaatattattctatttagaatctagtatgtacacgatcatcgcttttttaggaaaaagtacgaattaccccactcaactattatggtcgactgaattaccccctccaaccataaaaccggacatttgatacctcaaaatattgaaaccagataaattacccccttggctcaattaggagcggtttagatcctacgtgacatacacgtggtaaacccattaaaaaaaactttgggccctacttgtacacgtcatgtactcctacctcacccctctctttctctgttttctctctctgctacttgctagtgggacggggatcggaggacaggcggtgaccggctgaccgcggacatgacgcacgagtgaccgcttccgtggtagtggtctgtgcggagaacgcggcggcggcggtccggacagagaaggtcgtggcgagggagggtgggcgacgggcgtggcggggaaggccaccagcttcgccggagcgcaagctctctatcacgcttgggaccaactccgccttcgccgccggccacttgatccgcctcctttgccggacggacgactaaagttgaacaaggaaactcgtggctgcacttattttagaacgaagggagtagatattttgaagaaaagttagcaagagatgcagcctcttgaaaatttaccttgaacctatttctatcatccaattcatacgttttatctgtggctaatcgaacggttatttccgtgttttgtacagcaaatgttacaatcctgggttttattttcccattctttcgagctattttgacggagtgattctcatcctctgtgggctatgttgtgatttgtggactgaccaagattggacttctacactgactgatttacccttgatcatactactagtacattagtactactattcctttccataaatggcaagtaacaaatcacccagggactgagctgcaataataggaaagctcaagaatggcggcgcgaatttagcagcaaccctccctcgtcaagggaggaaagaagaagccgacgacgacgacgaagagagagaaattcagagaagctcgctgctcttcgtttataagcgacgccaagacaagtcgggtggtagagagagaaagtgagagtagaaagggaggacatttgtagtactattccgtaggagagagagacaagaagaagaagaagaagaagagagagagagagagagagaggaggcggcccgtccggcgtcgaggtgggcggcggcggatgggggactccggcggctccgtcgtgtcgatcgacgtggagcgcatctccttcggcggcaaggtccggggaccatctctctttccttcttgcttcctctcgccgtggtttcttgggtgggggcgctgctcgcattggggattcgggatgagcttggcggccatattttttttctttttggagattttcttggattttcgtcggttgcattgcgctgttcttgaatttttcctagtatatatggaggagtccaaactaacggagaatttttaggataccccgaatcttgcgagtcaaaccgtacgagaattcatctccgattaaccatgtgttttgctctatatttttttccccaaaaaagaagggagctgctttttatgcgcgtgtttacggcgtattttctcgctgctatttgtcaccgcaatctgcggttctgcattcgtcacctgctggagtagaatcgtagccgtgttcgtcgtcgcctacgtatgccgaaaattccacctgtaatagtgctacaacctgctgttcttgcctggccatatggtccttttctcgcggagaaaattaagctaatttagttcgtcagttagtcgccttgcatatgcgcttaattgcgcgatttttagctcaaaaagagtcagagttggactgccgttgcgtgcttgcttcgttgtcctaacaaccgcttttgttgcagcgcctgtttctttaattgtttcagttctttatttgattatctaggtttcatgctcgtaaatttccgtcgactattccactgtacaaattcctttttctctctatgtacgagagaaattggagctaaataaataattttttttatgtatggttgatgattatttgctctatagaatcttctgtccgtgtttgaccgtggactagtgtttgagtaagtgggtaaaaaatattgagtgtagtttacaggtctctttcatgtgaatttcaccagttttttttttaaataggatgcttgtgatgtggctgcaaaatcattcctctttacagaacaatcactcttcctgtgttagaaaaacatagtaattaggtgctgtcatttgggccttttgcttctgtgatggtgaagggatcgcttgtggttcgtatcatgatctgtggtactttcctttgtcctacaagagatggttgtggaatcatcgctttagttccactcatcataataaaactattatattattccccttttcttttgttagcatcttgtcagcctttagtataatatatgcagaaaacaaagatccttcaatcatgaagtcatcccctttgcgtcattttggagaaattctttccttcaagcgtcaggggaggactgccaccttttctcacctgatggagaaaaacaggaggatagttcttgcttgaccaagtttaaaggaccatttctctttgtatcggtgtctctgaggttgctgacaaacttagttgtagtacggtcacaggaagcacatgatttcttagttgttaagcattctgtagatgcatatatatttactttgattggaacatttctattatcttctttgtatacactttggggacttgagtgcttccatatggtgcgtttgcttatctcaaataataattgattttggtatagtgcaaatttaaatacattgttccattgattttcctcctagcaagttttaccttttgtactgactgtgttttttaccttctagtgttgatgaactgaaagttgtatcaatttgaaggcttatcttgattctaattatgatattcatctagctcaggatgtagacatgttgttggtttctctagtcttgcggattccatgcctatcctctggattccatgcctatctattttggacagataaggctaatttggcatatctattttgtattttagttaggattgggttttcatgacgatgcttcacattaacagtaatattttgttcttagctgatttgccacagttttcacctttttgtattcacagaacattttttttggctggaaaaatagggcctttctgttatgtaaactcatgcagcttcttttatgtgctttgcaatgtgcaaaaatctttttttctgttagatgctattttgattaaaattgttctcattgtttttctgttgtttaagcagttcttccactctcttgtttcttcaggaacatcatatacataccaatcatggacccgtatctgttgcggtgtatggtgaccatgacaagccggctcttgttacttatccagatattgctttaaatcgtaagtaccacataatagtttaaagtgcagctgttctctccgcaaattgttccagtaatccgacatacatttatttacagatatgtcttgcttccaaggattgctcttctgccctgaagctgcttcattgttgcttcacaatttttgcatttaccatatcagccccccaggacatgaggttggcattatgcattttgttagcactgaaatctgcatttgccttaaatatgacaaactatatacccgcaattttactgtcttgttttcgcccttttatgccctaatttgacaatcatgcagttgggggcagctccaatttcgccaaatgctcctataccatctgttgatgatttggctgatcaggttgcagatgttctcgatttctttgggtaatattctattagattgcctaaaatcttcaaatggccatgcccagtttttgtcaattctattctctgatcaaatttgctctttccaggttaggttccgtaatgtgcttaggtgtcagtgcgggtgcttacattcttactctcttcgcagtaggtgtttcttcaagccagcattttgtccattgcttattcatcgaaacttattattgaactatgtattttttatggcaggcgaagtatagggatcgtgtactaggtcttattcttgtttctcccctatgtaaacctcccacgtggactgagtggttttataataaggtagctgttggtaaatgacctaccaagttaatttaataatagggggttatactgactaattctttttaggtggcatccaatttgttatattactatgggatgtgtggactggtgaaggagggcttactgcagcggtacttcagcaaggtatctaaaattaatttcatttattctaattaccatattacattacctttgcatgcttgagccttttcttatggtatcctcgaattctattcttaggaagtgcgggggtgctctgatttacctgaatctgacatagtgcaagcttgtagaagtgtaagtatcacatttttttccttcctcgattgtttactcagctgttctttagatatattagatgttaactctctttgtacacattttccagttgctagatcaacggcagagcatgaatgtgtggcgcttcgtacagacaatgaacatgtacacattctacacttgttatcattttcaataactgcagggtcaacttccacgagactgagctctaacaaacctgggaacgatttacaggagatatgacttgacagaagacctgaagcagcttcagtgtaggacccttatttttgtcggcgagtactctcagttccatactgaggctgttcacatgacatcaaagctggacaggagatactgtgctctagttgaggtaaattcactagtgtgcttaattacctcaagattttcattgaaattaaaatgctggtttcataatgactttttttgccatctgttccaggtccaagcatgtgggtcgctcataacggaggagcaaccacacgcgatgcttatacccatggagtacttcttcatgggttatggcctgtacagaccaagccagttggactgtagcccgcgcagccccctcagcccattctgtatatcacccgatctcctgtcacccgaaagcatgggagtaaaactaaagccaatcaagacaagagtcaggcttgaagtgtagcatagcacacaggtaaataagggtggtgcagaggggtgtcgcttagggctgacatggtgtgagtttaggctaacctgatggtcggtttactgagttataattttttggtgggtaaaacaagataatttttatactgtcatgtagatataggaaatgctaggttggtcaggtctggtggggtggggttgtattccattaatttgtagccataaacctgtaaattgttacacattgtttatcaaaagcaaaggaaaataatagcagaaaggtgagctgttggtgatcattagatggtgcacgttgctgtctcttgtgctgtgggttgcctgtgctgaaggaaatgttctttgtgagctggcttgtgaacctaaattcttattcgttcattgtatagttttgttccatcagtctagatgaagcctttttattttattgtgagctttcagtggcacgttgttgccttattttccatacaggatgccttgtcaagatatgatatgtgcattaaaatgtgacctggatctatgcaatttctgtggttttgattcgttgaggttttggatttggcatcttcagtcaggtatcacttggattggaagtttccaacactgtcaggctgatatatcctgttgtaagcataaatactcaattattgaatagtgtaagtggttggtagccatctttgttaaattggagagcatgtgacttttttgttcttccagagatgttgaatgtggacatggaagtgtgctcaaccagattctgcaattgtgtatttatattgtccctgaaactctcattcctgggacctttgcttaatgcaaacattgaattatatagcactcctatatatcttgcaggatggccattgccatttgccaataaacatcaagatgccagttattgccatgtcagtgcatagtttaccaatgctccaacagatgtctctatactgctgttctcatgatttttggggccaaaaaattaatatgatatgatggcgtgctcaccatacataatctggtgcaagccgttcaaatgacagagatgttgtaaccacctgatgatacatttttaattaattgtttctgttgccagttcctttctctcataacttgtcttgtgaattgtgatgctacatcagcttcactctttcaaagctcacacctttacttgattaaaaagtttaaagagattttgttggttgttaatcctactactagcattatcatatttctgtctccatgcacctgttttctgtttgatgatcgaccttcaaagattttgtagggccattttgttgttcctcagtttacttcgtttagtaataattagtgttatttgggttgatcgtcgtctctttgagcatgcgaggcacacacataagcatttttcatataatcaaaaaaaatgaaggattattttgaaccatatgagacgtgagataaagtggtaccggtaaaaagaattgaaataccactttcaaagttttcttttcaaaggtgagcttccttagtactccctcctttttaaaatatataaaaaatttaattggataagactcatcaacactaagatgtgtcacattaactaaaatccgttataagaagtggtagtcaattatccattaatcccaacagatagacctatctacgtggcagtacacgtgtagtaggcaacctactgcgtagtgactcatgcagcattcaattatgtttggagtagtagctactccctccagcaaccgtaccatcgtgaaagggaacaaaagtaaacatgggtcctgtttggatccggagggctattaaatagccctgcggaatcttgttatttaggagtatgaaacgtagattactgataaaactcattccataacccttagcctattttgcgagacgaatctaatgaggtatgttaatccatgatttgctacagtgatgctacagtaatcagccgttaattatggattaatatacatcattagattcgtctcgcaaaatagcttaggggttatggaatcggttttgtcggtaatctacgtttaatactcctaaatagcaagattccggagggctatttaatagctcggaggatccaaacaaggccatggaatagaagagctttgcccccgaagcttgacgtcccgcaatcgatgatggtcgtgcaaaagaaaagagattccgtcctaaaatatagcaatttttagctataaatttgaattgctatattttgaaacggaggaagtacatgatggggcgcgccttcgcgcgccgcctgaaagacatcagcacaatcaaggagacactaattatatgagaacatccatgttaccgatcacacaaaattgaagcctacaattatatacacctttgtctacatgagcccagattaaaaatagaattaggctgcaagctgcatttgtctacaatctaatgtaagttccttgtcagcatctacatttctgagacctcaccatcctctcctgctgaaagccctttgggtatatgaacgccgagtcgacacaaagacccaccttttgtgtgtgtgcaatcaatctaagccatcgagaacttcagcttgattgtttggtcaggctttgagaccacaaaattgccagcatggtaaagtacccagctcccgggctcacccagggagcactgagataatgagtgctgcccatcagaggtggagagctggaagcgaacaggcttctggtcccaaccatggacatgctcagtgctgcaagctcggcgtccaaatcgcttgtagaacctcccgagatgaatcctgaagtataagctgtaggttaacacacggaagctgaaatcgatctctccaaccacttcaaagcaccatatttgctgaaggtatgccacagagtgaaatctgcatgaacaaaacaaggaagcacaggtaaggttggatccagaacatatgacgttctcaaccgaattgagtttgaatagatgaatacatttgcattccactggcacagagtagatacatacttcttatgccatcacttggaaagactacagctacattacatttcgacagctgcaataagatatactacctccgttttttaatagatgacgccgttgactttttctcacatgtttgaccattcgtcttattcaaaaattttatgcaaatgtataagatataaatcacacttaaagtactatgaatgataaaacaactcataacaaaataaattataattacgtaaattttttgaataagacgaatggtcaaacatgtgagaaaaagtcaacggcgtcatctattaaaaaacggagggagtatattattcaaccatttgattttcatgtctcgtgtattagagcaacaaacaacataagcaagttacaataacactatcccgaacaattgagaacatgttcatacagccaaacatatcattatgtttcagaactaagagtacattttaatttataactttggatttacaatattagttactcagtaatactcagtggaataaaccatggagaaatatgtactttgtcatgaggtgtgccaaacaaatagtggaacccttacgcaaaggtgtcatagcctttaaatcgtaaactatgttgactgtataaactttagattttcactgtactatatagaacaactaaatccatacaagctgtagaaaatccagcaggcgatgaattactgtatggtggaaggatatgggctgaataaaggtaattaacctgagaatcccatgcaaaaaggaacataacacatttaatttgtctagaacagtaaactacacgaaggattgaattagacagattcatttatataaactcgcatgtaacaggaataagggccatcataaatcaactcaagtagtggttttcaacatgaaacaatgggagaataaaattatcaaacctgtaggctgtagttcagtgacctaatgaccaggaatacacacctcttgatgcgcgaaaagcccaatagtacaaccttgtgcttaccctttggcttcttgcatttaccatcctgccgcaatggtagaagggggaacactcagaacatccaatatagtgattacacaacaccaaatatcctgtgtagtatattgctgctttctaagaaaagcgtgttactttatgtatctataagatgcttttttttttctttaatatctttataaggagagatatggggtttcacccacattaattgtatcacttgccagagagatagaaagtgttctaataagaaaattccacaagaatacgttaccatatcctacccctagcctactgaatatatataagcaccggctccttcctactggcaatgatcttagcatttagcactgttttttgtttctggcaccgactttttgtgcctgaatatgtcagcattcagtactgtttttttcatattttggaccaggaggtcaacactcaacaatctcatagaattgatacttctgaagaacatgccaaacataccacttcactctgcacgtctttgtgtgaaaatctgattaaatgaccaaaaattgagtaacatgtacagtctatatgtagtaggcttgggagatatcaggaatccctgtggtaacttgtccttccatgcctcctgcatgcaggagcatgtatccagtgaagaagggtggtgcacccaggaacaagggaaatgcttactccaaactgagctgcagctccctagaagggtgatgagacgagtttactggggagaagtacacaggcctgtaggagatagctcactgttttttatagtagtcaccatgtaacaatctacctctaataaatcaatttcctggtgaatacattcagataacaagtgcatcccctaaatcaaaagaaggtttggaggataagatagttaaccaaaataaatctgccatcacaagaacttttttcacgctcacataactattttaatctaatagttaattaaaataaataagtcttatcaaagctgatgaggaaactaagataattaattgtagaattcccagaggataatctagcatgttgtggcaactctatgctgtagatgtgaccacaccgaagcactacatgcactgatgatcttgcataatgcagtgtcattttattaagtatgcacctgcttgcagtgacctgatcactacccaaaacaaatactacctccgtcccagaatacttgtcattctaggttgtttagcaagtgctaaagttagaagaaaaagactataatacccttaataaaatattatatagttagatgtggaatggtggtttggtgtatgatggggagaaatttgaattggaagtggttgatgtgacaaatagtacttccaagtgacaattattttgggacaatttttgaatgctaaagagacgtattgtgggacggaggaagtaaaaagtaaggtggtaacaatattcaatatatcactgcttatttttcttgtcaaatatctgaccactgcttagtaacatgacatagaaatagctcaaacgttttagtgatcatattcctcatgcagagcgcccaaaatagatattttgagctgtgtactgaccctcaagctatataatctgcagatataactgtgccacaacgccgcttgttgcaactaaatggacacccacttgattggaagtaatcagtgcctatcaacaaagataatgcaggtatgaggtgaatttacagttctgattggcgagggcacccattgcggaagacaagggaaaaagattagactatctagggtagtaaaaatctagctagtgagaatctgattttcctaacctctgacttttaatatattttattgatttaacaactacaacttctttgaaattagaataaaaaactaaattatctaagggagtttcgaattctaggaaaagttgtagctggcaaaaatttccccaagtatgccaacctcatgaaaaatctactccaaaatctctatgtagaattgtcacttgatatcagaagtttcgaaatagaaaataatatgtaatcttatgtttcaaagtgatctatagaatattcttttctaatgggttggaatcatataaaactcctataaattccatacaaatcggaacgggcataaatttttactcgctctgatctaaaatgtagttgttcttttcaaatttatggaacaacgtatcaatattttacgacaaaggcagcatagttttacttctgtataaatattcaggagtaccgaggccgcactctacttttcaatgtaatatcttcgataagctgacccatttcaactaccacctttattaaaacctaataaaataaacattttacacaatgtggtgcatatttactccatacattgacttgtactgtctacaatatatagttcatattagtccctaaaatgtaaccaatgaatccgaaaaccagaagttccagaagggtatacaagtgcgcaatattggactatcaactggaaaatagcaacgccatatattaagtacaatcaaatataattgacctgaatccacaagatgctgtcagaaatcacatcacaaataggataatatgacatgaatatgccaacatggcaacaactaaagaagaaatggtagttcagtgctaccagccctctggacaaacgcattctgttttagtgtttactcataagtgctgaagagaaaggaaagaatgagggcaacctgctcatcaccgcaaagccacacgagtcaacaagccaaaacgtgattcgaacatcaaggaaagcgagcaatggggttgcagggaggtgcgcttacggattcgaggatgctgggatcggaggcggcggcggcggagtccctggatgcgacggagaggggcgctgaggtagaagttggagggacacctacctcgaacggcctcggcacatagggcggcgaagcggatcggatcggatcggcggcgctcgctcgcacgcacgcactggcgcggctagggctagggttcccccgcggccgcgaaaatggcgtgggcttcgagctccagcagcaagcaagggcaagatgggagagagagagagagagagagagagagagagcagcgaggagagagaaggaggcggacgcggcggactaagggcgagatgggagggagagagagcagcgagcgcggcggcggcggagcgagaaggaggcggccggcacgaccgaggtgaacgcggcggcggcgcgaggggagaaaattgacatttagccatcttcagcatggggtttctctggaatgccactcccgaatatggcttcgttataatgccattgtcaaatgaagccaacttactataatgccatttcaaccattttaactgatttccaaatgttttccatcattctctggcatatttgcccctagtcattttgttgactttgcaggggaaagaagaaaggggatcgatccccatccagtcgccggcggtggagcgtagcggcggcgacggggcgtagctgcgagtcggtggccgccggctcctcgtcctcatcaccaccaccacgccaacatccatcggctcgccgtgggcgtgacggagagggcgaggagagaggagcggagctcgccgtgcgcgcgacggaggcgacaagcgtggtgaagtggtggggagttgcgggagggaggcataggggacgccggcgaggcactcgaggaggaggtcgtcgaggaggatggagatgggggtcggcgatgaggtgggtggtgccggcgcggctggcgacggggacggcgccgacgtgggttggggaaggctgctcggctcagcggcgccatctgcatcggcgtagaagaacatcccacctgccccaaccatgtcggcgccgccgccgtccccgtcccagtcgccgccgtccccatccccagccatgtcgccgccttcccgtccccatccgcgtcgccaccgtccccgtccgcaccgccgccttccccatccccaagcgcgccgccgccttccccgtctccggccgcgctgccgccgtctccgtctctagctgcgccgccgagccgaacggagaggaggaagacagagaggagagatgagataggataagggtattttggtcatctcaacaagaaaaacattacaaaaaccattaaactgagaagaaatggatggaatggcattgcaacaagttgcccctgtttgagggtggcattttaacgaaaccacttttgggagtggcattccagcgaaaccccgttttgacaatggctaaatgtcaattttctcgcgcgggggggaggcggcggcggcgtgagagggagagtgacggctatgttagtgcgcggcactttttctaaaaagcccctcgactttcgttttctacagcgcgatcctatttcgcgtttctcccctcctgcgcatgcaatatccggattttagaagggcccttacgcacaacatcgcctcagggaggacactgttcggcagggccttttcgcaaaaaacccacccccatcgtccgccccttctgcgccgcataatattttgccgatatctcccgtctcgttgtctcctccgctcctcaagaacgagtcgcgggctcgcggctgccgatctccatctggcgaggagaggagagcagatcagagcaggtgagcatccacatcctctctctctctctctcccaccgggactgcttttgtctggaatttgcttgcgttaaccctgctagcttctcttctcctccttaatctgagagtcttaaacctctcttaatacaactagtaactgtttgtttcttcacccaaaagtgcaagaggaccaagctttttatattattattatagggctgcagggcatatatatgttattgtcatttgtcaatgtgtctagcttggtagcttacaggaattcattgcgttgctttctgattgcgcatgggtttttcaggttggcgcatgtcaagtgccgcagtgaatggattggctggtgccggtggtggcatcatcgcccagatcatcacctaccccctccagaccgtacgtacaatcattcttcccttaccatcttatgtagatatgaacaagatagatcaatatgtaatatatcaatccacaaacatgcaagttgaaaatcaacttctacaaattataacaaacgaaacttgaattactatatgtatatttacaattaaatttgttatttttgttataacttgtagaagttaaatttgaacttgcatgtttgtggcgtgatatattacatatttatctatcttgtcattttttttgaaaatttttcgtaaccatctagctgacatgcaataaacgggtgaacgtccactcgagctattagaatccatctccagctctgctgttcccttatagtctgctcaatccttccgcttcatgatgatggcctgagcaggtgaacacccggcagcagacagagaggtcggcaaaaaagaagaaggccaatggcgcagccatcgccaatacttccaccctcttccagatgcttcaggtagttcctcccggaattttagtttatttggaattgcctctgctaatgttctaatggtcaagtgtgtaatcgagttactccagctgttccaaacggaaggatggggagggttgtatagcggcctcaaaccctctcttattggcactgctgcttcacaggtaaattccactggtttagtaagtttggtgctactcacatcatttttttctctctaacaattgtgttgcactgtttgtcaatgtgatgatacttggatgagtctgtatggtggtattcaggatttatggttcatcctgtttgtggctgtagggaatctattactacttttaccagattctcaaaaacaaggtggaagatctagcagttgctcgcggtaagaagggtctaggggatggtaccgttgggatgttctcctggcttggtattgcagctgttgctgggtaagccatcactcttgcactgaaattgctaaacatcatttatatgtcaagtcaacctggagccccaacattcacccaaaaaaaattcgaatgcttgtctccatttaatgctggaatgaacaatacagtctggactctggacaactgggacattatcagttgctagtggtccaagaggacatttctatagcatactatcaaacgaatagcaatagagttctgatgaatttgactgagcttgcaaaggctaacatagtgttgaaacctgaattgttttggaaagggagataagaaaatgtaattcatggtaacgtatggttgccatgattgttcgtatggccttgcctccttagaactgactgaagcagtgattaactttgaatttgaagcatgtaatcctttccagttaagatggtttttgttctggaaaaccatagcattgtgaaatagtcaccagtacacttattctttctagtcgtttatgcatcgatctatccaaggctccaaccataacaaattcatcagaaacttcttgacaaagggatcacccttcaatgtttaatgggatttgcactagattgtattggatgcagggagaaaatttaagaaaaactttcctaacaagacatgaacataaatttgacaatactaaatgataagaatactcaacaaggttaacaagattctattttcctaatattataaagctcaaacttcatcaacttgattgcattgttacaattcttcatacaggttgtagatcagttctttttcccagttattttaattccacttgccaagattgcactttgaatgtaatattgcaacattgatcctcgggcattctgatggacacttttcttttctgcaggtcaatcaatgttcttcttaccaatccaatatgggttctcgtgactcgtatgcaggtaaattttgtttgacagtctatattttaaaatgacgtaaacaccaaaaaagatcatcgatgatggggttaatgagttactgtatgtcctgtcaaaattcaaagaagaggaaaaatcttctaatgtattagaatattaacactggtattgcacccattgaatttaattacagttgcttttgcccccactttctggtagcatacttaacttctttgtacctgcctgactccaagcattagctttgttttttatgatgacaatgatccatgaaacttccggaggtgccgaatcacaaggatattggtccatggcatcctttgtgaaattagttggaagaccatggttggttgtaaccaagcttgtactaaaaatgcaagtactattaaattggaacattctaatgttattcaaaatatctgaaagtattttatcatcagtttggaaattaactttattccatttttcagacacatacgcaagcagaaaagaagatcatggagtctaaaaaggagcttttgctgaaggatgttgctagggccaattcaatagaggtctcaattcttaaggataggttgtataaacttgattctgaaaagcctcgtccatatgggacaattcaagcggtgagtaattgagcacactcacattccttaagttgctatacattattttgtatatataatccatttcttaacaattatgcaacaaataaaataagatagtatatgaatcccccacccccacaccccatccctctctctatcttttgttgagagttgagaccacatctagatatttagatagatttctcacttgtactatttagatagtacaagaattcttgaatttttttttaccaaattgctttcttccttctaggattaattgctgcacttacagattttaaaattctgtttgcaaaaaacttgcgcatgtatacattgaatagtagctgcaatggcatttcaagttctgggccctataaacttgcttttaactaatcaaatgtatttgtcacttgtcagacatgatttttcttacttttatcagtagtatgtaggtccgggaggtctaccgtgaatcaggcataagaggattctggaaaggacttattccgacactaattatggttagtttatgtttctcaaaacatttgaactgaaattagtggttatgcaagtgactattgagaatgaaccatttaaatttgctaggtatgtaatccatcaatacaatttatgatctatgaaacattggcaaagcgtctccggtcaaagagatctggaaaggaactcccaaaaaagaaccttactgctatggaggtatggattttgttttttcaagttagctctgcattagaaatttgcatgtatctgtgtttgtggatatatgaacttttaacagttagatggcatcagctatttgcatgtactgtcttcctaggaacttcatgtttcttttttatttctagaaatttgaattgtatctttcaatcctgtaaatctcttcattgtttatccgctttgatgcaaatgaagctatattgatcatgatcaataatatttggttcaatgtaaaaggaattcattgttgggattactttaattactttcaaatcattcgtctataattcttgtattccataaagtattatatttaaagatgcatgctacaattattttagcaaaccagataatttggccacataaagcgccaggacagagtaatttcatatatttacaactagttatgcagtcactttatgattttatgaacgcactaaagaaaatttcatcattattacttccctttgtttaattatgtccatagcacagaccatatatttgtttctttgttcttcagatccagagctaaataacatctaaagctctttgaaatttcctttgatatatttatatgtcctattcttaccattttctctttgagcaggtattcttattaggtgcaatagcaaagctcggagctactgttgtgacatacccattgctagtggttaaggtaaacttaatattatatacatgtaaatcatcttatcctgtgcaaagtgttaaaattgatgcatttctcacttgtgcatctgtttaagctcaattttttttattaagaaatgaggaattactagcctgtcagatcagccagtgatgggccactcaggatttccaaaatatgcctgaatagaaacccggaagtccacatcgatgctagagatttcttttccatttctctactctgtttctctgttattaaaacaaatgctttcagcaaacaactacagtactaatagctgtcctacattgttgcatacaacaacccttgaatatgctgcacgcaccacatttttgctctccttcagaatataatttaatcttgtgagactttaatagcccgaaggatccaaacaaggccaatatctagacctgccacgggtgcaagtagttgcaggaaatgccagtctatctgggttgagtgtatgaatggtttacattatcaaaatagtgtcatgtttgttcgtgctgtcctgattgttgtattgaactaatgcagtctaggttgcaagcaaaacaagaaattggcaggaatgtgatgtcaagatacacaggtaaatcatttcctaccattttaacttactagccgaaaacactgtttcatttccatatttgttgggaccattgtttttccatgctgctcctatgtcttgtatgtcagacatttagctatacccccttcgttctaaaatgtaacaatttttagctacaaatctaaatattttgggacggagggaatatttgctattgtgcaagtaatattatgctgactgcctgtgttcgccaggtacgattgacgcgatcataaagatgatccggtatgaaggattgcacgggttttacaaaggaatgggtacgaagattgtacagagcgtctttgccgcctcagttctttttatggtaaaagaagagttggtaaaattcgtagttatgttaattgctaggagtaggaccgtgctcggtcctagctctaagaaacgataggcagttcatttatatcgaaacaatttgtaacgtcctctttgagactatatatcaattatttacaagataggaaatccaaaatgtctccaaatactaacgcttctcttcttgatggcgcgttgtgctttccatcttcaaaaaagaaaacattaacagccaatagcacaaacatcaaccaaaatttcaacatgctgaagaatttccttgtttttcactgcaacaattcaatacttttttgcacttcttgtctgtctcattgacacgtggggctaggacccaccttgaagaagtactagttttctactgcactcccaatatggagtatatatctattattgattggatatatatttgagggagtcatagcggacttattccatctgaagctaaaaacattgggctactggatcgctctcacggcccaacccatccatgcgttttcctttcctggtaggcatcaactctaattaatccggaggcctaatcacaatcctacttagattctgtatagattcacgtagtacgaatccaagtccgccaagaaccctagctatccccatctctcccccatatataccaacgcacagatcgatcgatcgacacatcgacaaagaatcaatcagaccgatcgatcacctcgtcgaacagatcataccatcgccatggccggcaaagcggcgaaggcgacggcgactaatgctaacaacaacggcggcggcggatacataaggacggtgacgctgcgcggcttcgacggcatccgcgtccgcgtctcggcggcgacgatggcggcggcgtcggcgacggcgagggccaggctcgacgaggcgatccggcggacgccccgccacgccgccgtccccgacgacgtcctcatcaacgtccccggcgtcgcccgccccgtgctcgcccgcgtcgccgactactgcgaccgccactacggcggcggcggcggcggcgagggcggcgagttcgcggcgccggaggggtacgggttcgacgacccgctggcgcggttcgacgacgagctgatggacggcgccgacgtgggcacggtggtggacctcctccgcgccgccgcgttcctgcgggtggagcggctggccgacctggcgagccgcgaggtggcggcgtgcatgcgcggccggacggtggaggggatccgccaggtgttcggcatcgccaacgactacaccgacgaggaagaacaggacgtccgcaaggagaattcttgggccttcgacgcctacaacgattgattgattatatatccatactccatggattctcaattctagagagagaacaaaattcaactccctccgtccaaaaaaaaaaaaaagctaacctatgaccctttctagtttgtattcattgtactattagaggtcacatcccctcttagattgattttttttatagagggagtatgcatcttgaaagagagatattgtacatggcaaaccaaggctataataattttcgttagttttggaataaattaaatctatataaatctacaatcttttttgcgtataatgtttgtgatcatgtcatgtattagtttccaaggattttattgcgtgcatccaaaaccgatttacaaacaaggttcgcaaaaccagggtgttttttttttttgcttttttttgcaagaaccatttaaatggtaaccgttaaaatctgtcaatttttataacaatttaaaatctagtttgtttttttttttgaacttgactatgaaactgatcattttgtgttcctgagcggtttcatgaaccctactatatatgtgcaaactggtcaacaggtgatgaaagcatttaaatggttcattatatgtgaaatctggtctactacttaattaattatatgctaatcatgtctctcattttgcaagcagctaatcatccgttccaaaacacacttgagaatagggtcttgtaggataattttctatgtgatcctttggtgtgtacaatttagttgaaagggttccatgcaattttttcttttcctcaaattcttacttaggatttgaagcatgagctcaaacctcatgatttgaattcctttagaaagtccaagacacctactttatttctattctcttaactctactttaatgatattttcctccaaattttttgattttcgtgtcaagtatccatacaaccaattcgacaagttcccctgttttcaattcctgcaaaattttatatggcatcatattttattcctgtttatttttcttttcctattgtttcttatttcgtacgttccaaaggagtactaagcctccagtaagaacacgagggatttaccctttcgcttatatctttttaaagtgtgcagtaagaaaacatacttgggagatggatttttccaaacataattatggatacgagtggtggatgtgtgtgtcttttatgtaatatagtacaaagaaagaaatgatgacacataagaaaaaataagtccatgtaggtggtcaaagaaccaaggaaaccaatatcccatagtacatatattaaattgttcttcatacattaaattaatctttttatatctcaatgtattttttttatatctaacatatatattggatgagtgttatcaaattttttcgacaattttttataattgttcagatggtttttaaataaataaaattacatctactcgagggataaaaataaaaatagtttccctccagctaggctcctcagatggacacttagactatagcgtgctatactatacagctaattaattaactagattacactggattaattaacggatatatctagaccaatttgccggcaaattccctgatgtcctcgtccttgaccgccggcgaggccatcgccctgaactgcctgagctccgacgtgctccggccgagctgcagcgccaccttcgtctcgaacacctcgccgttctccctccgctcgacgtcggcctcctccaggttcgcctcgatgtcctcctggatcttccggtagatgccggccacgttgcggcacagctcgaacaccatgcccacctgcccgccgtgctcgacggtgttcaccgccgccgccagcgcgccgccgatgacggcggcgccggacgcccacgcgccggcctcgccggcggagccgatgaacgccgcggcgagcgcggcggcgccggcgagcgctggccccgccacggcgaggcgcttgttgacggcgaggaccagcttgccgacggagacgtactcgttctcgtccttggccttgatgacacggaggatgccgcgcatctcctcctccagctcttgggtccagccgttcccggccatggaggtggctcgccggcacgcggtgccattggttgctgctaccttggtcggagagcgttgctggtgcttcttggtcggcggccaccaccgggcgggctcgacggcgttggggaacttgtcgagcatgacggggaggagaggcagcgggtaggcggcgtcgagcgcgaggacccggtccatggcgtcgtggacgtcggccctggtcaccggcgcggcggcgagcgcgagcgtggcgcggacgtcgcgctccagctgcctccacagcctggtggcgttccgctgctcctcggcgagctgcgatggctggatcttgttgacggcggccatggtgacggcggcggaggccaggaggacccccgcggacgccttgagcgccacgacggtcggcgcggcggcgggcgcgagcgcggccatgagggaggcggcgaggaggagggagttgttggagtggagcagcaggtggttccagttgtcccgctgcctcccgatgatgtcgtgcatctccgcccggtccgccgccgcctccgcgacggcccggagcttctccacctcgcagccgccgacgggaagctgctgctgctgcagcgccgccacggcggcgcgttcgtcgacgagcctgagctcgtcgatgccgccgccggcggccaccagctgagccatgctcgtactactcgtagctgtactggcactgacgcttgcccggaggccgctcgccgccaccctactactactcctccgcctcagcgagctcgccgccggcggtggcgggagcatgacggcggcggcggcggtggccagcgagcgcgcgagtgcaccctccatggcagcaagtgtagcactagctagcttggttgcttctgatggatggctaggttttcttggttttttataagaggagagggagtgggcttgcaacgttgacgagggaaaataataggagacttgaagcagtcaggaaagtttatgtgtaggaaagttttgatgtgatgaaaaagttgagtgtttgaagaaatattttggaattaaacacggcgtgagtctcaactccatgtgatgtgagagattgggagaatcgtaggagcaggggcatgcagcagcaggtcaaggagggcagtggattcaacttggcttgaccatgaccatgcaccacccctagttgtctctcagtcgtacgtccccttctcaacgtacgctaagatcgaacgcttcttcaatgtgcgtaaccacaggaacatctactactttcttcgtttcgtaatatacgacgctattattttcttaagatactttgatcattcatcttatttaaaaatttatattcttattatttattttattatgatttgatttatcttcaaatgttctttaaacatatgatataaatattttttatttgaacaaaatttttaaataacacgaacgatcaaacgttggtaaaaaaattaatagcgtcatatatattaaaagcagaggtattactttcttcttaatccaataacccaactaattttttattatatgggtccgtctatgctttatccttaatccatctacacatctaatctctaattatatatgtcttacatgttgcatagaaaaatcatattactagttaaaccaaaactactactccagttgattctctctataaacaaggaaagaaaacaataatagtagttgattggatggtgagggtataaataaaccaaaagggagataaaaacattcagtatttattttgtttttttttcttttcaggaactgttacaattaatttgtggtgaggagatatgaactaatcaagaaaaaataatgcttttcttatggaggtctacactacatactagttagttactcttgagtttgttttctagagaagggagagtttcactgtctcacactatatattagcgaggggattgacattgaagtttgcgaaactgacttggtacatcgcacggtcaggatgaattctggcatttatgatccgagattaactgtgttgtctgagtggtgatctgcggtgccaaattttatttttatgcagttccgcattgataatattacactattgtaacattaacatatatgcttcacgtcaaattcactgctatcgtatactcgctccatattaaaatatatataattattaactttattcagtaaaatgtttaaaactttaactattgataactcacacaatatttataatctgaaaacatatagatcatttaggtagattttttataagtaattgtacaatattataattttttgttagatattatcttcatattataattaaaaacagagtattttttagagaccatataaaatcaatggtatcatcatatatttataaatatggaggtagtagatggataggtcagacctaaaaataacatgatttcattaaacatcaaatatctatgaacatattaaaaatgtagtacagctcggcaaaggctaacttgcagttcggagcaagctagaattgcttgaagcaggtggtgtaaattaattaattgtgtggtttttgtttcttcccatataccactataccgcctcttctttttgaaaatatttgttcaggcctttcatacaagagcacagaaaactacagtagtattcaatagaatcagagaaactttgataccattgcatatatattgtttcctccgatatttaatatacgacatttgttaacttttgaatgcatgtttgaccatttgtcttattcaaaatttttgttaaaacatattcttatatatgcaatgtttaaagaatctttaatgataaattaagttacaataaaataaatgataaaataataagtatatcaggatatgtttccctctaatgaaggctatatattaatatacagcaattttctatgcccctacatggcatggacaaatactagagcgagtagtatcgattaactggttgcttaatttgtatattctgaaatctaacgtaccttagctaccatgctctcttcccaaccaaaccttttttctttcaatcgaacctggtttctttaataattgtaatatatcctactaattgaccactaacaatcatccaagaagatgatagagtacacttaaacaccaatcaacgagtctcctctaaaccactcctagctaccatgttacagtactataatactatacatatagtatatggatgagatttgatcgattcttctagcttattcatattaattcatgcctgccctgaagaatattcaaccttttaggtatcaatttatggatggatgcatgaattttgtctcaactagatcaagttgatcctactcttggcaatttaagtagcagtactaatcactctgcagccacatgtagtgccttggtttggccgacacttcatgtactctgaaacccttggacacacggcgacaactaatgcatatgctgtacttaatttggcgagaatttgtgattgatagacgatatctctgtcctcgaaccaaaggaaacgttttggagcacaagaattgcataatcacatctaatttgatcgtgttttgatcttttttgtggaggtttcccggcccacatctgtgtacattttgccacaacttgagttagcaaaacaattataatattacccgctagcttgtgcattcatttggctctagctatagtaacaaatactactccctccgtattttaatgtatgacgccattgactttttaacaaacgtttgacctttcgtcttattcaaaaagtttatgtaattatcatttattttattgtgacttgatttatcatcaaatgttatttaagcatgacataagtatttttgtatttgcataaaaaatttgaataagacgaatggtcaaactttggttaaaaagtcaacggcgtcatacattaaaatatggagggagtatatttgagtgagtcagcgaggaacataggcttgacttccttttttttttgtggcactggttttaaatttacaggttagcaaaatcctatggatacatggatcctacttgggttaatttataagtttgatcattttgaccagaattcaatctgactagagaacaattcaaggcagctattgtgtgtgtacatgtacatgcatgatgcgacacatcacatgacatcgaccctgttgtagtacaattaagtggctaatattccttccgtcccaaaataacttcacttttcatcctcgtgtgtaaacaaaggttgaagaaaagtgaccaaagtgactctcattaattaaaaaaaaacgagcagtattcgtgggtggtattggtgagagcttcgtaaggagtatcaagaactcattgatttgtaaacccatggtagagtatgataatagaagtgaaacttatttatttttagagccctttgaatcgcatggtagaaaaaacggaggaataggaaaaacacaggattttgacaggaattgaagtgtaaaacagaggattgcaaaacacaggaaaaatacaggaattgtcgtttgattggagcgcaggaaaaacacaggaatcgaatgagagagatagactcaaaggaaattttccaagaggttagagctcttgctaaatttcctccaaaatccacatgcattgtgccattccataggaatttcataggatttagaaagcttcaatcctttaaatcaaagggccaaatagaaaaatttcctatagaatttgaatcctatgaaattcctatataaatcctttgattcaaaggatatatgagataggctaaatataaaattgttttgagacggagtgagtagttggcaaagattgatttgaacattataggggcaagtcattcaaacatacataaaccttaattgtactgctaatatatcgagcatttggcacaaatcagttgacaacccagctggcaaattaattaatatatcgactgataacgccgtgtaatatattatcctgatcagacagattgtgcactggcatagaacatcgacaaaactaaagataattacattttcatcccatcgcggactccacaaataactcctcctgatgtgacccctcggatcacttatcggctacatttacaacatgtttctcatcattcgtattgttcacttcagatcagaaggtaaaaacttcagtcgtatcctcattaaaactgactattgaaaccaaaacagatgtctactgaactttctttggtcttggaacagaagtggccaattctttactagatgatctgatgatgaaaagaaccgtttccatcagcatgccaccgactaatcctaagatgcctccagcagcattctggaaagtcataaataaggttgttattataacacaactcacaaggtttggagaaagtcctgttttaaatggtttggacaaacacacaaaaaacttgtcaacattcaaaaccaggaagtcttccctgtgcctttacccactaatgtttaccagaaacaccactaagatagataatgcaactttactagcctgcttagtcatagagttttgcaggaaagaaatattatgccaacttgccaagccaacacaatatgatgccaaagatggtgcaagaggacaagagaaatagtggatgcaccatgtagtgtgtttcttgcggacttaccattacaggactgttgttgaacagagctctgaaagcaacaaatccaaccaaataacccgtgaacattataagaacaacatgaagacctgaaaatagaagcacagcaatcaattgtacagtggaataccatacaagctgatattagcagccctagctccaggctgaaggtacattaagtagtgagatttaaagaggattaagtgtgctataattggcatgctggttcacctatctacagcaaaggaagggtctaaccctgttgtacatgaaaatgctatactaaaagagttatacacagtgaaatattatcctcacagtggaaagaaactaattttattggatccatcaattgtaacacttttcaagaatgtgtactgaatagatgcctctaggtgattgaagtgaccaacaagtgcgagaacttggaagtaattagtccaacacaattgtatgcatgtgtgtgcaagctttgaaatatgcaatttactctaaacctagttagaagcaagctgacaggaattctgattatcgtagtgcaataacattataagaacaacatgaagacctgaaatagaggcaaaacaatcattggccagtgaaagccatacaagtaaatattagcagtccaagttcagagcaaaaggtacactaactagtaagatttaaagaggattaagtgtactaaaattaacacgcagattcattcacttgtctagttgtcttaccgcaaggaaagtttgaacttcattgttcatgaaaatactactccctcaggtcaatattagcaaattctactaagcgcaagtcaattccactgtctgaaacatcatatatttcggtccggagggagtaatagagttgtatgcagcgaaatagtattattccttatatagttaaaagtaactaattttgttagaactaactagtcaaacatatttgcgcgactgaacagacaattacgcacacatatgtgagcgagctttaaagtgtgcattttactgtaaaccaagtcagaaactaagctagtaaaggaagttgttaatggcaatgtcatgggaatatgatgatcttggcacaaagataatggtaccaaatccaatctggtccttgtaggaggagaagagctcggggctgtcctccttcgccggcggcgcgacatccctgacgagttcggcgtactccttcctctcctgcatctccctgagcttgtccagcctcgccttcagctcatcgctctgcacagccagatcaaaccacagattaaaacaaaaacagaaacactagaattttcttttcgttgctcgatgagtgaccgaccttgtcgcgtggcttggggctggagagcaggaagtcggcgccgtggaggaggcggcggaggggcgggcgggcgccgggggaggcggcgcaccagatgtcgcggagggagcggtaggggacggcggagcgggcggcgagggaggaggcgaggtcgcggaggtcagcggggaggtcgtgggaggcggcggcggaggcgaggaaggcgcggagggggtcggtggcggcgacgacaaggcccgacgccatggccggcaatctcgatctgaaaatctcctacggagtgtagttaagtcagctgatggaggagacgggagggagcaaggcaggggtggagaaaggggtccgccgccgccggcgccgccgaatcgccggtgactttccggccgccggagccacttctgcgcctgggtgggaagacttgggaaggagaggaaggatggcgaggggagataattttttacaaaggtaatttaggcaaataaacttataattaatattgtaaatttcacaaaatcacatgtaatttgatcaaattatcaggaaactacagattaaacacaaaatttctcacacaactataaatttaagattgaatatcacaaatctacggatttacaagtcatcacaaaactataattttaatgtcaattttaatcacaaaatttgggtattttataactcaaacataatattagccctaatgatttaaaccccaatatctatagttttgtgataattttgttatttatacgtagttttgccatacttagcctcaaacttaatctatagttctatgataaaattattgttaagtctgtagttctattatatattagcttaaatctatagttttgtgataattgacaaaagtattctaacttaatctatatctatgataaaattattgttaagtctgtagttctattatatatcagcttaaatctgtagttttgtgataattgacaaaagtatacgtagttttgtgaaatttactcaacttaatttgaaattctcaacgttaagcaaataaaaaacagaacgtgacataatccactgttaggcttagctgctaatgctcttggaatttttggccaatggttaatacttttatatgccgaagtttctttaaaaatcatattaatttatttttgaaatttaaaatagttaatactcaattaattatacgctaatggctcacctcgttttacgtatcttcctaatcttctcaatcatcttctccttaaactcagctaagtatgacttatccttttttatgtttgcactaattttttaaaataaaacaaatagtcaaatgttgcaagtaaaaagtcaaagtgacatctattatgggatggaggtagtaatttttaagctcctatattcctatttgcttgcttgcactgtacctacacttgagctgcatggatgcctggatagactattatatgtactccctccgtcctaaaatatatatatttttggatcctgacacggtttccgagatgctaccttgactatcaatatctataaaagtaagatgttttaaataaaaagagttatatattataatagtttgtttaatgataaatctagtaacatcaatttgacatgattgatcttttttattctttctattaatggtcaaagttaaaaatatttgacttgtcaatatgctaaaaatgcttatattttagaacggagggagtacttgtcaccagtggatatggggaaggctcgtgcttatacaaatgaaattgaatataattctaaatggtttagttcaaatttgaaaacaggaaaaatcctcagcccaaccatctcctcccatcaatctttgcaccacctcgactagtgggatttttacatacatggcggatatcgagctagttctacccggcttggctcgtttagcttgtgagctagatatgggcggaagacaagcatgggcacgggtgatcaagttgggttagcggcgcgaagctgagtagggtgaccgcacagttggcgccacatgcggcgttggtcggacctgtgcagagtcaaatggtgaagaggattgtatgatcagggttgttcttgtccatcacctataggagcaatcaccagtacagaggatgatgactagataaggtcactggcgaatggggcgtcgacattgcgaccttatgtagcgggagctttgtgcaccaactccctaccaaaacaaacgccttgttgttgcatccaagtacttttaaagcacagataaagttgatgaccgcccaatctacaccaaacagaacctctccaaccgaaccgacgtctcccgctcttgccatggagctccccatgaccaaagtctggaagtagaatagtcaaaagaaggggaagagctctagggaatgggagagaacttagccggtaaaaggaatcccccgatgtcgagcagggctccatccaaagtgctattcattatgtcccgcggctttccatataaacaaacgagtaaatttcatcttgaaccacctatattgaccaatgtagcataatgggctagggataagtttctcttttcacttaacaccacctaattttaccatctttttcaggttggaccaggtttacggcatgggctgcgctttggcctaatccacgcgagcagatggtgtttgctcatggtggcggtggtacgtgataccaggagcgtgtgcgacgcgtcggggtggtcatcagcgagggcgagcatgtcgtcgtccagtggatgcggaccctgtggtgatcatgctcggccccgtcgcgctcaaaacaatactacgacacttcttattacgttgacaggatccgagaccataccagaagtccagaactatcccattcagatcatgcatgagaagcaaaaaaaaaaaaggctattccatttagcagtaatcaagatccgatcttctcttttcttgagaaaatttgacatgtttccggttaccaatcgaggaacacgtacggattaattactctagttttttcgaagagcagaagagaaatattgattaccccacaaaacccaaatctcataggaattactgaatacattgctttgtttcactctccaactcccagggtcaaaacttttctccatggattgctccatgatcgaatagcagacgcatacctgtctgcctcataaacccaagaagcatgctagcaacgagccagtcaacaaccccagcgattccatcctcaggaagccatcgatcgaggtggcatgggtgtccaacaggcagaggccctttgccctgacgatggcgacacggccgggtgacgagacttgctccaccttggcgccgacaaccaccttttcaccccagccgtatgcaacgagggtcttcagctggtggacggtggcgtttgtgtgtcgattgttgagttcatgttgctgcataacagtcgcgtgtcaagggagacttttttgggttgggagggaagtactcgtacggtcgtactagagagggagacggaaccgccgtcgagggagccctcgacggtgcccggagacggggactgccggccgctagtaaacgcacaccttcttgcgtgggtcgaagcccagtctagtggcacaatcagtaaacctggtccaacttgcaaaggatggtaaaaataggtggtgtaaagtgaaaaaagtgacccacccctagcccaatgtgcaacttaggtcaatataagtggtctaaagtgaaatttactccaaacaaaaattcaacgacctctccaagcgacaactctactaaccacctaccaacatctgttccaccccactgaccacctcaccagccatcaccggatagtacgaggcactagaaacctggtctcctgcatggctgcatcactacaacagaaacagcctgtagagacgggttttatatgtggtagagacggctatacccgtctctagtagaggtagagacggttttagtacccgtctcagaggcattgccatagctcccgtgtcaaacgattagagacggtttaaatatccatgtgtataatctagagacggtcaatagatacggttggaaccgtcgctacacacataactcgaaattcaaatcaaatttgtagacacatggaaaaccgtctctaatttaaattatgaccgtgtcaaatttgaaatacaaatttttggattgatcatgtagagacacttgatgatcttagccacggttgtttccgtgtctagcttatagtagatacatctacgttttctctagaaacagtcacaaccgtctctattcataatgaatttattacttatttctttcctagagacaatttctgcttctatagacacggttgtgcctgtatctacacttattatttatagccccgctattggtcacatgccaacaatcaatacatctttcattcagaaaacccataaacaaaacaataccaacagattgaattaccatcagaccacattaacaagacttttaacgccagtagcttgtcattaaaatcaaaagcaatatctatacattgttcacaatgaaaatacttcaacgtcttttctgatataacaatgaaacaataggttcaaacaaattaacacaaaaaataattatattctaatgcagcaagtagtacggaatggtacaattgctattgtaaatcactcttcttcactgcaagactgagatgatgctctagcactagaggatggagtagtatttggtagctgattttcatggttctgatcaaatggaagagaggatgtagcagtatttggtggctgacttccttcgttctgatcaacctgaagatacatgcatgaatttgttattctggaagcttatggctatataagttacaacatttaaaattagtaattttgtggccatacctcttgtcttggaatgaccctagcaactgatggtggcaacctagaaatcaaattatcctctggatatttctcagccaaatatgatactataaaactaatgaaaccatttacattactggagctactcccttcactgcttcctgatatattcgaaaatcttccaccataatagtttgttagagtaatggttggacccatgcctctaactctacccctatgatcctttccaaacacttctaacatagcttgttcaaaatcagcttcactgagttcttggccatccactcttttctcagccaatttcatatatacttcattctacgttggaaaaaattgtagactcttaatgtagtgtattttgttttacaaagagtttatataagaaaagcaatatggaataccattttttcttcagtagcatcgttaacatatctgccatttttcgtcttatggcattcatcaaagaaagttgctcggtccacctctactccattaacttcctgcagattatacatctctagtgcatgaggaattgaagcaatagtgaattaatatatgaaaattgcttaaaatcttaccagctctttcctctttcttgcaaaactctttcttcctaatatgtgtggatgcttaatattctgtgcattctctttgtttttgtcactgattttctaatgatacaacatatagcatcaatgagctgatataaatcaaaatgatggtcattcagtcactaaaaagtcccaacatatatttaccttagagtcctctgagtaccagtaagaaactagggtggcccattgagattcagcaacagttttgggcacggtttgcaatactcgttccataggtaagttaggcttgtaatagccctttttcagttttgacttgtactgcctccatttgccatctaattggtggagaatccaattattagctcttccatcaattgcaaactttctctagtgcatatgaaaaataaagagtgaatggaattatattggaatcaccataagaatatgatttaaaaagctgtgaaaattaaagagcaatacctctacttcagaaatcatttttggatgatatactctcttataaagtttatgattccattgaagaatgttcagtggagctagatgtggcttcctgacaagtgttcctaaataggatctaaatagtatccaagaactatagcagattgggagcaaggtacattgaaacgtccagtttgacaataatcttaacaccctctggaagatttccaacatttgccaatttagttggtcctcgacgtcttttaatgcggccatcaggatctgtaaaattttaaaagttagtctgtaagcaaaagttttgaagcgaataaacaaatacatcttacaatactcatagcaatttgtgcgccaatctgcgtttgttatgttctgttcttcaacataatgatcatttgggaccagttcttgattttgtactccattctccaaaagctccaagccttgtaatctttgggaccttgttgccatttgcactatattttaaaaaatggattataatgttattaataacaaaacctttgcatatcagttaaaatgccaaaatgagaacatgcaaatcttcatatctcaagttgataaatggaaaatttacccttcataacaaattctcatctttgtttttttttcttctttgttaagtcatatcctttctatggtttagtgcaaattaatcctattataaatatgaacaggaactcacaatctgtgtctatgaataactttagccaaccaaaatatctatgaatagttttgcttaagtctttactacttcaagaaaacaactttgatcacaaaagcatatgcagtatacaatttccatataatagtcacacgagcagtggtaaatcacctcgatagtactccctccgtttcaaaatgtttgacaccgttgactttttagcacatgtttgaccgttcgtcttattaaaaaaatcgtgaaatatgtaaaactatatgtgtgcatgaaaagatatttaacaatgaatcaaatgatatgaaaagaataaataattacttaaattttttgaataagacgaatggttaaacacgtactaaaaagtcaacggtgtcaaacattttgaaacggagggagtagttgactgggatcgaattgcccaaatccacaaaagcaaagacctgtacacatacgaaatgagagatgttgaaatacaccgccatctctgtaaaatgaaatgatcatttacgtagaatgtgattaacggcaagattacgttactaatttaaattagatctacatgattagtgcccaggttaacgagaatgtgtttggtaaccaaattttgggtgctagcatactgatgcatcaatgccgttcacatctaaattgatcaaaacttgatttacaataattaaaaaacagtgcgttaacctctttctggacttgcttgtgtagaacaatcatcaaacaattggtgtgcacactgtgcagccattaaaaaacaaagtggtagccgattaaacaacaaagtggtagcctcgcctgcttgctactaacaaatcaaacaagtgatgatgccggcggctgcagcttgcgaagcggtaattaccttggacagcttcagcaggatacgatctggacgatcgctaccgggacgcactgcctgacggctgtagggacgtccgagcgacggaggtggagcaaatgtgatctggacgaccactgagggacgcgctgggcaacggctgcacgaatatgcgcgccggagctggcggtaggatgcacgtgccggaccgacgccggggcgcggcaacgctgcaagcgcacggcaggctggagccctgctggtgggcggtggctgggcggcgttcctaggaattgggtattgaaagattgaaagaagtggataatagattggttttgtacctcagttggatcgtaaccacctccgactttccgagtgaacgaaaaatatcccgcgaacttcatcagaaaacgcgcgtagattaaaaaaatttagcgaacgggcaccaaaaacaaatcttttcacacgcgtttgacgcggtttttctacacccgtcagaaggaccgtgtctacggattttaacccccgtcctatcaaattttcatcaaatggattaatttaactatagagacagttcattcatatgtctcttccatctgtatctagtaatagggtgggataggaggtaggctttggtaaagacggtttcccaagccgttgctttgaaaacgtctctataggctgtttctgtttctgttgtagtgtatcttttatatccaacctgtcgaccccctctacctccacctcccccaaccactaacatctcgccagccaactataccttcacctgcatctcctcccctaccggccatatcgccagccacctgaaagtcctcctccatgcgccaactctacctccaactgtacctcttcaacttgacagtcaactccacctggactgctagatccaagataggggtggctagatctggcctgagaggccaattttgctatagccccccacccctcaactttgaccgatgatgaccatcgctgaagcacctcaccgttgggttgccaccgcgcgtcagctccttccccccacgtagatttgggccaaccgccatggccgtctgcccaccatagttgtccttgctcgcaaccaccagagtgagcaactgggctacagcgcggcgagagggagaatgtgacaatgttagtgtgcacacggggagcaactcgggcacacctctcgatcgatccatgtattcttccattcttacagagctatgcattcttcaattctcacaatgctttgctagtcatttgacttttatcctttaagtttaactaagtttattgaaaaataaaatagtatttttaatataaagcaaacacattatcaaaatatattcaatgttaattttaatgctaattttttataaacttggtcaaatctaacgaactttaattaaaaaaaaagtcaaacgacttataatatgaaacgaaaggagtagcttcgagttataaatgaggtatttaggctgtgttcggatagcagggatgggaacccaatctccctgcacggaaaacggagcggtccattagcacgtgattaattaagaatcggctaatttctttttaaaaaatggattaatttaaattttttaagcaacttttgtatagaaactttttacaaaaaatacaccgtttagcagtttgaaaagcgtgcgcgcggaaaacgagggagaggggttgggaacttggagttccaaacacagccttaatcctttgcaattcatctcaagaattaaatacgctactttacgatctgagagatggtcgattgtatagtaaaatcgtaacgcctattcatatatacttcctccgtctcaggttataaaaccttttgactttggtaaaagtcaaattattttaaatttaactaagtttatagacagatatagtaatatttataataccaaattagtttattaaatcaataattgaatatattttcataataaattaggttgaaaatgttattattttttctacaaacttagttaaacttgaagtagtttaacttcgatcaaagtaaaaaacataacctgctgcgacggaggcagtacatgactttattttgaggttgcctgacagtgccagctactccagctagctattgtctgctttcgtattgacttggggtagaaaagcaaactgactatttttttcattgttgctctttatcgaggtgatcatacttcctctgttttttaatagatgacgtcgttgactttttctcatatgtttgatcattcgtcttatttaaaaattttatgcaaatatataagatataaatcacactttaaagtattatgagtgataaaacaactcataacaaaataaattataattccgtaaattttttgaataagatgaatggtcaaacatgtgagaaaaaatcaacggcgtcatctattaaaaaaacggaggcagtacttctttgttttacttccatcgattgatctcgctcacaatgtcaaccgtatatttttcgcagtttgcacacaccactttgcgctacttgtcaatttgtcagctggcttgtcaaccgctttgtgccaaattagatgtacattgcccaagattttcagcgagtgaatgcagcgatggcaacgatggtgagatggccgtccctcggcggcggcgcgtggacagcagcactttccgttgtctcatttgctcagccacgtcattttctagccgattgagggcacagtgtgtgaaacttggaatgaactcaaactaatgaaataaagaattttaactaattcggatctttacaaaagaatcaatggaatccctaacctatatatgcacatctcgctcaaattcgagcctctgaattaaccatctaccattttcaaatgaggtagatgtctaataagtgagtgattagaattttcttttgttttagaagagtttcccggcaaaatccttgacgtcgtcgtccttgaacgacggcgacgccaacctcctgaactgtttcagctccgacgtgctccgcccgagctgcagcgccaccttcgtctccaacacctcgccgtcctccctcctctcgacgtcggcctcgcccaggttcgcctcgatctcctcctgcatcttccggtagaacccggcgcagttgcggagcagctcgaacaccatgcccagctgcccgccgtgctccacggtgttcgccgccgccgccagcgccccgccgaggacggcggcgccggacgcccacgcgccggcctcgccggagccgatgaaggccgcggccaccgcggccgtgccggcgagcgctggccccgccacggcgaggcccttgttgaggccgaggaccatcttgccgaccgtgatgtactcgtgctcgtccttggccttgatgacgcggaggatgccgcgcatctcctcctccagctccggcgtccagccgttgccgcgtgcgccgcggcggcggctgctgctgccgaagctgttcgacttgttcaccggagcgcgctgctgctgttgcttcttcttcggccaccaccgggtgggctcgacggtcttggggaacttgtcgagcatgccggggaggagggggagcgggtacgcggcgtcgagcgcgaggaccctgtccatggcgtcgtggacgtcggccctggtcaccggcgcggcgagcgcgagcgtgacgcggacgtcgcgctccagctgcctccacagcctggtggcgttccgctgctcctcggcgagctgcgacggctggatcttgttgacagcggccatggtgacggcggcggaggccaggaggacccccgcggatgccttgagcgccacgacggtcggcgcggcgggcgcgagcgcggccatgacggaggcggcgagggcgagggagttgttggagtggagcagcaggtggttccagttgtcccgctgcctcccgatgatgtcgtgcatctccgccctgtccgccgccgcctccgcgatggccctgagcttctccacctccacctgagctcccggagacgacgtcgggacggcgacgacgcgcgggtcgacccagtcaaggttaagcctgaggctactggggctcccgctacccgacgacgacgacgacgggctctgcgccgtgcgcacgccgccgctgaccgccgcgcggcagggcgcggcgatccggctcggcctcagcagccgccgctgctggccggcgcaggtagatgccaagaagaggcggtggtgagcctggacggccgccatggatggaccgagtgacgacagagtgatcaccgacaagtgaagccggcgtcgacgtcgatcgacggcgaagtggatcggttgcggatgatcaggtggagttcgccggagctgaagttgatgtgtgaggagaggagaggagatggaggaagcgagagagagagcgaggtggtatttatagggaggtttggtttggtttgaccggggttgggtttaagtggggcttggtcaaatttcaattcagggaaaccgtggttagatggaggatcgcgtccaaaggagaccgtttccggctaaagtgtgtgtgatcagcttgacggggttttgatttggggacaaagaatggtacgtccgtacaccctcctccgtggtcactggatccacactagccttcttgcttgtttccttctattattttatactcttgtttgcttgcactgttatgtacgcttgagctggatagagtattatatactctcccctaaatgcttatcgttttaagcttttgtttgtaacgttggcacattcttcttattcaaaagattataaaagtattatttatttttgtttgtaacttactttattatgaaaagtactttaagtatgacttatacttttatatttacactaattttttaaataagacaaatgatcaaacgttgtaagaaaagtcaaaacgatatttaatttgggatggaggtagtacttatttcatctaaaagtctaggatatatttcttttggcaccacaattaaaaaggaattaacccatctcttatgtaataaaaccaaggaactatgggtacacatacaaccaattaatgagtattaagtatattttgcttctgatcaataattcaatttagcacatgaaaactactaatatagtcatcttatttgaaaaaaaaaacaaaaaaaaagaaatatgctaagacttttggatagagagtattttagggagggggggaatgcaattaactgaattctttacatcacttttctaactcatctctctcgttttccgtgcgcacattttttaaactattaaactgtgtgtgttttgcaaaaattttctatacgaaagttgctttaaaaaatatattaatccattttattaaaaaaaattaactaatacttaattaatcatgtgttaatgtgtacattgttttacgtgccagagaacccctcctccgaacacagcctaaggctgtgctcttctcctagtttttccaacttacctctctcgttttccgcacgcacgcttttcaatctgctaaacggtgtgtttttgaaaaaaaaatctatatgaaaattgtttaaaaaacatattaatctatttttttaaaaaaaagttaatatttaattaattatgcaataatacgtatttcgctttgcgtgctggggcaaccctcctcttgaacgcaacctaagttgagtgtgagctaacaagctatcgatactttttatccgggcctacttacatgtaccttttctggtgtataggagcacgaatagaatatttaattctaactgatttatatcatattagttagtatattagtcagcaatcagatcagtggtatatagtaattcttttctcggtcggactctatggctgacagtctcatcttttcgcttatgcttatatttatcagttaaaattgaattttcaaccttaaatatggagttgattttagggtttttattgaagtttatttttcaaccattgcttttagatcactaaaaacatgtatataaaagttttatttataaattatttttcgtttgcaaatatgccatttcgcttattccgaataagcgaaatgatagttccgtcagcctcttcgctccaacacaaatacacagatgttagcatgaaaaccggaaagggaaaaaaaatcatgtactacccattttgcgtatgagttgcacattagcattttgacggctgctcttcccaacgagctagttgtagcatctccaacagagtagctatcccgttctccaagcttggccaagccatctggctgtcaaactggctccctcgatggccaaacttggccagtacaaattggcttgccaatcgtcggccccacgcgagatgctctctccctcctctctctttctctctctccatccacactctcttcctgccccatctgctccaggcaccaacaccgacgtatggtgtgtcgccgcggtgacccactccggcctccaccaccacccgctccgaccgccgctgccgtcgtttaggccgccatccgctgcaactaccatggttgtcgtgtggcgccggccttcgcccatcattggagccgagccaccgccgtcgcggatttgtccacgaaacggtgccgccaccgccgacttcgcatccacatgcctcctcgcctcaagcagccaccgccacctcctccggggccatcgtattaggccggtggctgaccgaggtcgccgtcgccagccaccgtccgtacaagggctgactggcatactgcatgccctactgtatattattttttaagagcggagcggcagtactgcgtatattatttagtactctctccgtatattaatgtatgacaccattgattttttgaacaacgtttgaccattcgtcttattcaaattttttgtgcaaatataaaaatatttatgttatacttgaagaatatttaatgataaatcaagccacaataaaataaatgataattacataaattttttgaataagacgaatggtcaaacgttgattaaaaagtcaacggcgttatacattaaaatattaaaatatggagggagtactatctaaaataagtattcggtacggctccagctttatggaaaaagattgtttagataacatttcctaagtcattcatttatagattcataatatgcaatatttaattcatctttctaagcaagcagttatggacttatggttaatatgtcaaattatccggttaattactctctccatccataaatatatacaaacgttattagattacttagcaaatgctaaggctaaggagaaaaaactttcatgccctataactataagagatggactttgctaaggctaagggagaaaaaaactttcatgccatataataagagatggataagagaggatgtttggagtaagatgggaaaagaaataataataggtaattgattggacaagcaatacttagaatatttatatttataagtaatttttttcggggatttataagtaaattttaaagacgttacattcttatatttgtggacagatcgagtgaagccccgtttagttcccccaaaagttttcccaaaaacattacattgaatccttggacacatgcatgaagcattaaatagattaaaagaaaaactaattgccactactagaaaactcattttcggcgtcgtaggggatcgattttcgtaagcgggcatgtaattcggagccaaaaccctgccggcaaaaaaagtacccggggtggagggggcggtccgtctgcgaagattgatctttgcaggcggtccatataagcgtcgcctgtgaagatcgatcttcacaagcggcagacgtcgtgcgcctgcgaagatagatcttcgcaggcgacgcttatatggtccgcctgcgaagatcgatcttcgcaggcaacgcttatatggcccgcctacaaagatacccctatatagttttcttcctccccgagccctgttcattctccccgacgtttctctctcttaaagtgacttaaatatagggggggaagttttgaacttcaaatcttcgggggatttttctaaggtacttagatctactcatttccacactaggtatggaattttttaagcttttagaccttaatttgtgatggatttatgcattcaaaattgtgaaggaagagctccaagttttttaattttatttcttttcatatgttgatgttagatgtatgtgtaatacttgatgcctattgttgtagtggtttaatgtggtaacataaattctcatttttttttatttttgctatcacatccaccacctagttctagatctagatctagatcttgtcatatatacagagagaataaaattttaaatgtctatttattcggtgcaatcaaaaaatagttatagtattttgtaatatgccgatgatatgattttgttagattttcctaatgtactaatttggcatgtctgtgtaaaaaaaattgaaataaactttgatttttttattactttacacttaacctttagttaattagttttgaatagcgataagttttttcagtaaaccctacaaatttggtattaattgtgcaaatattttacgtgcatttttttagagatatggaaagtcgggaatggatgtatcattggccgaggtttttgtctccatatagaaacgaagtggctaaatttattggtattgccaaggcacatgctgagaagaacaatatgaggaagataatttgtccatgtgctgactataagaatgaaatagcctgggactttgacgatgcttttaaagtgaaggagcacttagtaactcgtggatttatggacaagtacgaaatatggacacgtcatggcgaagaacaagtggacgggcctgaaaatgtagttccgacacaagttgaagacatggtgcatgacgatggttctgttgaggacaaaatcgacctagaggaaatgttacgtcatgcagaacccgaggtgctgatggggtcggctagagggttaaataactttgaagctttacataaggcagcaaaggaagttttgtacgatgagtcgaagggctatgacagtgaattcacaacactctggtcagttcttgaacttatgaggttaaaggcgagacatggatggtctgataccagtttcgacagtctgttagaacttctgcagaaaatgctaccgaggcctaactcactaccatccagcacatatcaagcaaagaaactcatatgccccctttcacttggtatggaaaagattcatgcgtgcataaatcactgcatactgtacaggaaagagtacgcttctttagatgaatgtccaacatgtggtgcaagccggtacaagtcgaatagcaatactggcctagaaccctctgaagcaactgagggacgacagagaaaaatcccacagcttgtgatgtagtaccttcctgtcaaagaccgcattaaacggatatactcaaacccgtgagatgcggaactaatgcgctggcatgaagaagggcgcaagaaggatgggatgattcgacacccggcagatgctcgtcagtggataaactttgatgctcagtatagagagtttgctaaagacccacggaacattagatttgccctgagtactgatggagttaatccttttggagacatgagcagttcacatagtacttggccagtgcttctcaccatgtataatcttcctgcatggcttttttaaaagcgaaaatacgtactactctgtatcctcatacagggagggaccccgtcagcctggtattgatatagacgtatttcttgaaccattgttagaagatatggctgatttatggaaagagagattgaaagtgtgaagcatctaggcccccggtgttaattttggtaattaataacaagcgctaattgtggactaaccattgtctttgagctatacattttaagtcaggtccacgtcatatgtgcgcatggatgattatcgatggattaaaattgacggcgcaaggcaaagagaaagaagacggtaaaactagtgctttaatttagaattgatcgaggtgtagggcgatcaaaattgctagtttattttctagtttcgccgtactattaagaggggtaatgacctagcaaagagatgattgaattgccacattaggtcattgcattttcatttgtgctctctttttcatcacacacattcacttgcaaattcactgggttcggcctgaccggcgtgccctggccagtctgaccggccccaagcgggcggtctgaccggcgcataaggccggtctgaccggcggcacttgcctggtcagactggccccctggaggccaagatgatgctgctcgggatggccgatacagagccgatggagccgtagtcggtcagaccgagccgatggcgatctgaccgagccgaggccggtctgaccgcgcactcaacgccggtctgaccggccaggccgatggggccctctgacagcacttcaacggctagttttctagccgttgcagagtagcacggtctgaccggccacatacctccggtcagaccggcagagcacaaagttgggggatttcgcccccaacggctagttttggtgggtgggagtataaatactcccccaccagcaacaaggggactctcttggcacccaattcaattgcatacatcccttgcacctctctcacacccacttgagctttgtgttcatccatctagtgtgttagagggttgattagccaagagtcaagtgcattgcttccatttgtagagctagtgtggcacttgataaatcatctccacgccgggtcattgcttgttactcttggaggttgccgcctcctagacggcttgtggaggagttgcccgatgacctctccgagaagattgtggaggaggcccggcgccggtttgtgagtagtttggagttcaccaccttcggagtgaaggaagaactaccctactgatcgaggcttgggtagtcctctccatgggccggctcccgccttgtccaccccttgacgaagggggcgtgcggtggcttcgtggttgagcggtggagttgggctcgcctcaacgaggagtaggaaaccggcgagtttccgaacctcggtgaaaaatctcttgtctccttgtctcatttgattgtcgcatttacatttgtgcaaatttacttttctagaaacaaactagagatcatatcaccctaggattgctaaacattgacataggagtgagatttactttcctagagatatagttgagccacaatcaccctaggtttgcaaaacataacttagttgcttagttagagttgacactcaccaagcctagcaacttaggttagttttgattaggtgtcatttagttttaaatcgcctattcaccccacccccctctagtcgacatctcgatcctacaaagtgtgggacgagtacttaagggaatacttcatagtgaaggccatcatcttcgtgaccattaacaattatccagcaatgttttcagtttcaggtcaaattaaaggtaaaataggatgtgtgatctgcttgaatggaacgtactataggtatctcccaggttccaacaagcttgtgtacatgcggcaccggcggttcctacgcacaaatcacaagtaccgcaagatgaaggcggagttcgatggtactgaagagactgatcctgcaccaaaacctacatcgggagaaaaggtgtgtgcaatgacagagaaaattgtttgcgagtttggaaaaatgactaagaaaccatcaaaggggacaaagcgcaagaaacccgagaagaatacgaagggaggggatagtaagaagcaagatgacagttcgaagccagataataaactccctcccccattcaagaagcattccatattttttaagtacctcccgtactggaaagatctggaggttcggtatgccatagacgtcatgcatctagagaagaatgtgtttgacaacatagttggaacattgttggacatgccgaagaagactaaagatggtctgcaatcaaggatggacctagtcgagatgggaatcagggaagagttacacccttaagaaggagaaaagaatggcaaagtatatcttccaccagcctgtttcacactgacacctgaggagaagaagtcattttgcaactcactccgtgatgtcagagtgcccataggtttctcatcaaacatcagtcgactagtttcaatgaaagatttgtcggtatctggttataattcacacgactgccatgtcttgctcaccgtgtttcttgcaattgcaataagagccataaaaccggagcatttaaaggttgctatcacaaggttgtgctactttttcaacgcagtgtcacagaaggtcattagtctcgaagagttaggaaatctccgtacattcgcacatgagacccagtgccaacttgagatgtgtttccctctgtcattttttgatatgatggagcgcctcattgttcacattgtgccgcagatggttgcgcttggcccattgtacctccatcaaatatggtcatacgaccgttacatggcggttctgaagggttacgtccgaaatcgtgcacatccagagggatcaatggttgagggttatagtactgaagaggttgtcgagtgctgtatcgattacctcaaagatggatatgcaattggagtacctgtgccccgacacgagggcagattgagtggcaggggaacgataggaaagaagagattcgtcacccatgatcacaaatcattccaagaagcttacttcagcgtgcttcatcagtttgctatcgtcgagccgtacatcgatcaacatatcgaactaatacgagctaacaataagggtcgctccaccgagtggataatgaaagaacacaagcatctcttcatagattggttgcgagacctagacttacctgagggagaaactaccgatgaaataactatgaagcggttggcttgtggtccatcaactacagtaaattcttggcagggatatgacattaatggatatttgtttagcacaagagcccgagataataagacctgtacgcaaaacagcggtgtccgtgtggaggcaattgatgaagccagggaaaaacaatcatacttcgggtttattgaagaaatatgggaaatcgactatgggcacacaatgctattccccatatttaagtgtcagtgggtaaaatacccgaacggggtcaatgttgataagttcggccctactgttgttgaccttgcgagtgtgggtcacaaggatgacccttgggtactcgccaatcgcgtggcacaagtgttttatgtgaaagacccttcaaatttgaagaaagatatagtgctaccagggaaacaaaagatattgggagtggatggggttgaagatgtcgaatattacaaccaatacgatagtatgccactttatagtcagtttgtacagaagattaagaatgtcgagacatctactcagaagaccgtgaagccttacatgcgcacggatggtgtgggcaaaaatgttaaagggtaatgattgttgagtggcatgtaagcatctaagaagttagtagttctgtaatggtcgtatgtaaggtgatgtgtgatcaaatcgcaaattgacgaacaattgtactcaacattttgcatattaattaattcgtactaatttttatgtgcaattaccatttgaagtgtaaaaatttagttaaaaaatttaaaattagtaatatttgaaaagtgtaattatttttatgtgcaattaccagtttgttaaaaagatcttcgcaggcgaacggcccgcttgcgaagatagtaaaaaagatcttcgcaggcggaccgcccgcttgtgaagatagtaaaaaagatcttcgcaggcggaccgcccgcttgcgaagatgatattcgcaggcgggtgtgacccgcctgcgaagatctttgccctatataagggcaagcccgcggcgccaaaatttctaaatccaggtgggaaccctagaaattttggcgccgttaggctgccgaaaattttcaccgccgcacgcctccgccgtcctccgccgccgaccgcctgcgaccttcactctccgaccgtcgtcctccgccgccgccgaccatcgtcgtccacgcgctgccaccgagaccgtcgtcctccgccgccgccgaccgttgtcaagcactctgccgccgccgccgccgacccctccaccgcgcacccgctccaccgccgccggctcctccaccgccaccggcccctccaccgccaccggctcctccaccgcgcgcgcggccgccggtggcccctccaccgccgccggcccctccaccgcgcgcacggccgccgctggcccctccaccaccgtcggccacccctccaccggcgccggccgtcggcccctccaccgccgtcggccacccctccgtgcaaaggcgaacggcttcatcggccgatcgtcgtccacgagcgacgacgtcctcggccgaacgacgtcttcggccagtcgtcgtccacggccgaacctcgtcgtcggccgttcgtcgtcgacggccgaagccggtcgtcgtccacgaccgaagctcgtcgtcggccgttcgtcgaacacggacgtgcgtgcatgtgggtgtttccttttatatgtgtgtgcatgtgggtgtgagggggtatatatgtgtgtgcatgtgggtgtgaatgggcatgaggggtgggtgatatgtgaatgaggggttatatgttgattgtgaatgtgaatttgggaatgtgggtgatatgtgaatgaaattgggagggtatgttcaattttgcaggatatgtgaatttaaatttgttcatacgacatattgttaatatacagtttatttttgtactaattagtttgtactaatttgagtaatttaaaatgtggacgataactcttttttttatattagaggtttgaaacgatggccgatagtactaaagggactgaagagaagggtttaggggagcaggagcagtcccttgctgttgtggttgctccggaaccaatggtcccaccggaaggtagttccaacagcgacgtaggtgacgaagacgaggagtactcatcgccaagcgatccttgtccaagcccaagcccgaagagaaggaaaaagggcgacggtgaagaaggcgacaaggactacattccccctaaagaaggggtaagtaaacttaatatgtaaaatgttcaccgtgataactattagcccaagctaattcgaaacttccatgcataccttctcgtaggaaacggcgccacggcgatcaaaacggcagccgaagaaaaaagtttcgtcgaaagacgacgacgtaccagctaacacaaccggcacaaagaaaagcgaacggtcagcaaaggcgaagaaaaggaagggcgagagaagcgtgaatagaaaggatgaagggttccatgttgttacccatgtttagcctaaaggagagccgctcgcccctaagatggcacgtgcgaaattcagttcacagtgtggcataatagtaagggaaaatatctccatcacggtcaaggactgggatcatgtatcggatggggataaggaagtcctatggaaagagttgaagaaaatcttccagttcccagatggatcagatgcagcagtgagaaattgtgcactgcaaacaatggccaagtcttggcgtggttggaaaaccaccttgaacaagaaatttgtgaagacgggacgcacaccattttcgacgtatgccaacataacccccaatcagtggaacgactttctgaccttgaagaactggccggaagaaattaaaaggagccaaaagtatgcagagttggccaagaagaacaaatttcctcatcgcttaggctccgcgggatacgcaccaaaggtggagcagtgaacaaaagaggaggaggaaatgaggaagaaggggcaaccggtaccaatggaggagtggacacagagatcaaggaactgggtaagagctagaactccgaagatcacggatgaaggaaaagtatcgtttgaaaatccggagctgcagagcgttgctgataaaatagaaaatttatccagttcacaaaagaaaggatatttcaagcctaaaagggagaaagatgtgctaagtacggcgctgggtactcttgagcatgggggaagggttagaggtgtgtcgagcaagatgagttggaaggaagggttcaaaaatgacccccacaagaagcgtgaagcgtacaaggataaatttagagacgaaggggctgcggagtttgaaaggcaaatgatggattctgcgtcaagcacatgattttgcctcgccccgaaaccaaagaaactgagccagattaccccttcgatgacctcaaggagaatacaccctgcagattacacgttcccattggacgctccggtaaaactcttgaggccgctacagccattgctatccctgggagaacatacaatgaacagttcatacccgatgcgtatgccaaggtgcagccacaagtggtccacgaagggtttgagtcctacgacattgactacccaactgcagatggtgtatctgtacttggggatgcggtcgatcttgtaattctctggcacaagaatgacatatcctttggattgggcaccgacgccacgcaaaaacctgtggtgcctaaaccggggttgggaaaacctccgaggcctcataagattaaggtgactgataaggcggatgatccagagatgcaaaaggaaaatccattgccgaaagtgcaaccggagattgcattgccggaggcagccatggagattgcaccgcaggagacagccatggagattccagtgccggatgtgcccatggagattacagtggcagaaccagaggtgcaatttgtggcatcagtcgggtcagacaaagaagaagtactaggattggaatgggacggtacagagccagaaaatatttgaagacctttctcctgcgaaagaccccgaggtgccacgagtgcttaggagccacgactcgaagtccaaagatgagaacaaggagaagttcatggtaaccgtcttcagagggggtaaggaacgtgccaagctcagagatgacgacccccagaaggctgctgaactagccgggccaacatacttcgcaaccgatgattgcccgaaaaagtacgaacacgggaaagcactcttaccggaatgggcactggaagaagcaccatgggagatgagaaggttacataacttctacatggaggccagcaagaaaggcttgggcaatataacagctcgatcaccggcagattgtttcgacgaagaaggttacgtatggttagatttctcatatctccacgccatatattgtcgggataagatggacgtcaactacgtcggtgtttggtgcatgtgagtatgagttttaattaattatatgaaaattatgtacaatacaaatccatgtgattgttactaacaaacttcttctgtaggatgcagtacatggatgctaagaagaaaaaagaacccatcggcttcttggatccaactcggatctgccaaacacagcatatcgtgaggctagcaccagggtctgaccagctgaagggcaagaatccaaaagagatagctgaatacaagaagggcttgcacaaggagaaattgattaatgtcgcacagtacattggacgaaccttcttgcactttcaaaataagagagtcgtcatggccgcttataattttaagtaagtccggtacatttatcttgtacacatatgtcttactttagctggtactaactaactacactgttgttaatatatagcgatcattatatctgtttactcatccaccctaaagacggaaccgtggtagtcttggatcctctcaattacagtcacaggcaatacaaagaatttctaacaatcttacagtagtaagtgattataactcttgcatttctatatgaatgtattataaataaatatcctccttaatatgaaacggtacgacatccatacagtgcataccaatactacaagttcaagggtagagaacagacccgaacaagggagaagctgctagtacgtacctattggccggtaataccccactcacttaatgtattccaattgtttcactaattgcaaattgtaactacttttttacatgatatgtcctgaagtgtcacaagcaactgcgaggaacggtcctttgcgggtattatgcgtgcgaattccttagagttaatggacggtacaggactaacgcagaggatgtaagtctctatactatgtactagacagctcttgatattcatgatactaatatattgattaatttcaatgcatgcagttgccaagattagaatgtcgaccaagctttgacgatacaggtatcacaaatgtccagcgtgatctgtgccacttcatccaccatgagtgctgtcatgtcaaaggagatttctttgacccagagggtgccctagcggcaagtgacgatttcaaggatcttcgggagtggaacactgctatgccataatataactagatgacgttatttgaagtgacaatgtaaaaaaatattgtaatatatatattttggcaacacttttgagttatgcaatatatgtagatttctcagtaccaaatgcttgataatcttccaatatatgtacataaaaatctacctgcaagaatttctattaaataatttaaaagtaatttacggccaaattgtaattaaatttcaatattttctacctatcttcgcaggcggaagttttttttttttttgcaagcggacgattcctattttcgcaggcggaccggactagccaacgtccgcctgcgaaaataatcttcgcaggcggacggccgccccgcctgcgaagatcggcgatcttcacagtcgttggcttataggcggacggccgccccgccagcgaagacccttttctgccgcttgcgataatgcttttcctagtagtgtgcacagttaggagattcgtctcacggtttccaggtgaattatgaaattaattttttcattcgtatctgaaaatcccttttaatatctagtcaaacatccgatgtgatacccaaacatttttatttcgcgaactaaacaggctctgagtagtgtagaacgcgtcctatcttatactactcctatatgttgcacatctggtatgctgcacacgcatgtgcaggccagcaactgtcggtttgtagcttcaccgagccttcatatatatccttcgatctgacaatgcttaactagcttcgagttatgaattatgcattatatttaattaatccttcgattctcatctcaagatggggtactggtgtacgatcgagtcgatcgatgctgaatggtagtaaaacatgttcctatacatttttttcgtgtctagttcacgctaaaattagaagtttggttaaaattgaaacgatatgatgaaaaatttgaaagtttatttgtgtaaaaaagttttaatgtaataaaaaagttgaaagtttgaataaaaagtttggaactcaaatatttgaggttgcctgccagtgccagctgcgtagctagctactgtctgcttccattgacttcgggcagaaaaagcagtgggacgagatgctttttttttcgctctccagtttgatcatttttttaggccttgtttagaccgtgaaaagaaaatttttggatgtcacatcgaacatttaaccggatgtcggaaagggtttttggacacgaataaaaaaactaatttcatagctcatctggaaaccgcgagacgaatttattaagcctaattaatccatcattagtacatgtgggttactgtagcacttataactaatgatagactaattagacccaaaagattcgtctcgcaattttcatgcgaactgtacagttagttttattttttcatctatatttaatgctctattcgatatgatgtttcttccatcgtactattatcgatctcgtttgaaatatcaaccatcttttcgcagtgtgcacacgctttgtacaatactcacttgggttatgtttagttcacaccaaaattgaaagtttggttgaaattggaacgatgagacggaaaagttagaagtttgtgtgtgtaggaaagttttgatgtgatggaaaagttgaaagtttgaagaattattttggaactaaacacggcgttgatcctaaaatatatagcaatgcgatattagattatatatactatctttctaaattcgtagtattagatgatatctaatttgatatagattactatagaatggatcaattatatttcagctgaagtgtcaacagctttatgccaaatgctcaatatattagcaataatatgacggcctatgtatgcctgagtttggcttgtttgatagtaatactcaattcgatctttgccaactacgggccactattaattgagaatttagagtatttatcattaaatttatgtggcttaacttttctatcatttaattcataaagtttgactaagttttttaaaaagaatagtaacattttcacaagccaaatttattataaaaatatattcaattattcatttggtgaaactaatatagtattataaatattactatatttttctaaaatatattcaattattcatttggtgaaactaatatagtattataaatattactatatttttctataaatttagttaaatttaaaatagattaagtttgactaaagtctaaacttcttacaagctgaaacagggagtaccattcttagcttgctccgtcaagttgaagttgatcacagtatcacacgcacacacttgcctgaaacgaagcgaagcggtctcgtcgttgggacgagatcccccaatctaaccacggtttcccagacttgaaatttgaccaaacccaaccccaaccccaaccccaaccccggtcaatccaaacccaactataaataccaccacctcgctagtctcgcttcctccctccaccatcacattccacatccccctcacccctcacctcacctccggcgtcgacctcgacctcgactccactaaccaacctgacccaagcatccaactccatcgcctctgtctccatccatccatggcggccatccaggctcaccaacgcctcttcttggcatctacctgcgccggccagcggctgcggccgaggccgagccggatcgccgcgccctgccgcgcggcggtcagcggcggcgtgcgcacggcgcagagcccgtcttcgtcgtcggggagcgggagccccagtagcatgagtcttaaccttgactggatcgctgccgtcccggcgaaggaggatgtcagcggcgcggcggcggtggagctggagaagctcagggcgatcgcggaggctgcggcggacagggccgagatgcacgacatcatcgggaggcagcgggacaactggaaccacctgctgctccactccaacaactccctcctcctcgcggcgtccgtcatggccgcgctcgcgcccgccgcgcccaccgtcgtggcgctcaaggcatccgcgggggtcctcctggcctccgccgccgtcaccatggccgccgtcaacaagatccagccgtcgcagctcgccgaggagcagcggaacgccacaaggctgtggaggcagctggagcgcgacgtccgcgccacgctcgcgctcgccgcgccggtgaccagggccgacgtccacgacgccatggacagggtcctcgcgctcgacgccgcgtacccgctgcccctcctccccggcatgctcgagaagttccccaagaccgtcgagccgacccggtggtggccgaagaagaagcagcagcagcagcagcagcagcgcgctgcggtgaacaagtcgaacagcttcggcagcagcagccgccgccgcggcgcacgcggcaacggctggacgccggagctggaggaggagatgcgcggcatcctccgcgtcatcaaggccaaggacgagcaccagtacatcacggtcggcaagatggtcctcggcctcaacaagggcctcgccgtggcggggccagcgctcgccggcacggccgcggtggccgcggccttcatcggctccggcgaggccggcgcgtgggcgtccggcgccgccgtcctcggcggcgcgctggcggcggcggcgaacaccgtcgagcacggcgggcagctgggcatggtgttcgagctgctccgcaactgcgcggggttctaccggaagatgcaggaggagatcgaggcgaacctgggcgaggccgacgtggagcggagggaggacggcgaggtgttcgagacgaaggtggcgctgcagctcgggcggagcacgtcggagctgaagcagttcaggaggatggcctcgccggcggtcaaggacgacgacgtcaaggattttgccggaaaactcttctaaaaaaaaacaaattctaatcactcacttattagtcagctacctcgttaggctcgaattttccaatttgctcccatagggagtcgaacccaggacctcaggtgctactgaggctcttataaccattaggctacaagccctttcacagaggctcgaatttgagcgagatgtgcatatagattagggattccattgattcttttgtaatgattcgaattgaaattagtgacaattcttttgattcttcattcgtttgaattcatatattccaagtttcacacactgtctctccaatggtgggtacaaaatggcgtggacgaggagacgaaagtatcaccttagcaacgcggcacacggtgtagcattggaaacgagagaaacatttgggtcataaactactactacctccttgttggatgtgttctggaatcgtcttgagatcggtgatgatacataagagcaggtataatagcaggctattagccagctataaacatattttaataagataaaagatgagagagaagagcagcgagatacatatctgtagctagctgcagcacggactccaagacgcactatgtgtatgacaggtgggaccatatgctaatagtatagtaagcaactattgtatgaattagctattagattggctatagataaattggagttagtagtgggctatactattgaacttgctctaaaagcggagaaaatttctccttttttcaagaaacacggtacaaacatagacagcctatcaacgaaagattttttttcacccataaaaaagtatagactttattttatgaaagaattaacttctggcctctgcataattgtgaatgcacacaatcggtaaaagcggataaaaaataacctggtgtccaatatgcacctgtacaaagccacattcataggcaccagaatttaaacccgaatatatccacaactccactatcataatcatgttaatgctcctgcatttcgaactcttgccaaatgtgtgcaaatggcctaaaacaattttcagaaatgtttggatcacacaagttttcacatggaaacagttcagctacaaaacataacattcacacattgcattttgaggcctcaaagaaacacggagaacgcacacatgcatggttcgtcggcacgcagagattttcatcggttaccgctggagccatatggtcgtcggtcgccttcttgtgggccatgatctggcactgcagacaacatgtgaattttatttgttcctgaaagacaacaactaatttctgaccgacaatttgactgtctgggttttgcaggtctcagatagtcagatgacacgttttcagtcgatttttggattaacacttgaattaggaattttaagattaaattagccacagatgattaatagtactaaattactgacagaaaaaatgatctccttttcagattaaagatatctgattatcacgccagctaatagctaagggaccccaaaaagaaaaagatatcttttgtcagcatgtcattggcaggagaacgtgattggttcagattgtggacgtgaagaactatcaactacgtgcccaatgatcaactcgttggacctggaattattcagagacggcaggtcaattcaaacaggggcactacggtgttcagcttcaacacagcgaaaactgcaattttttttgacaggagaacggtttgaatcaatcgcaaaaactcaatggtagagcataagttgttgctgaaattcagtgtaaaactttcagctcaatcgcagcattgacaggatcagtttcatgtgcttttgacaagaaaggtaggtttgatttcaggctctggtctttgcatggtgaaaaagacccagtaagactgggaaaaaaaacaatagacaaacttgaaagaatggttttctccagcgtgaaattctgaagaacggtcaagcgtagacccattctaagagcatgaatttagtccttgagaggcatattttgccggataacagaattcaggtcagagcatttgaaaaccacctttcaatttgcagggaaggaacagcagaatatacaatagaaacagttgcatatttccaagatatgataaggcagatggacagggtggatttcaaaggcaggccaagctcatccatagatatcaaatcatactttgggttcatcataagtcataaccggtgtcaacagaatacctttgttaacaatctcgcatttgctgacaaacaaacccaactaaacaccagataaatactcgaaatcccaaaccactcgtaacaatttgttgctaactgcatattgcgtagcactcagcatccttgttctttagtcagtaagaatcaagttggagaggtgctgcaattttttcctactaaattctctacgactgcttcaaagacatggcccttgcacgaaggttaagaaatatccccctgaaaaagaataggatgatcaggtgaggctgagaattggaattccatccatccaataagttaccaaagtgttcaggccactagaaaaattaccagcaacatgcaacaaagctgtggaaaatcacccggaactgcaacggcatgtacatatgatttatccaaccaactattggccaaaactgcatgttgatcagatatattaatgggccatggagggaacatcacaggcaagcagcaatgttgattattgaaagtaaatcacataccatccaagcagacaattgcaccgagggatattgtttcttaaccctggtcttcacctccttaaaaggcctccctacatcacaagatgcacaaacaataagtaaactattcatttggttaacaagacatgggctaaaggtttttgcactcaacactgccattacatttagatagatatccatctgatccaagaaaaaataacaatattcatagtaaatgtgcattattgtaagtcagtcccttttaggccctagaggacctccattttaagtactctgggtattgttgtttatgcagtacgttccaaacctcacaattaaaaaaagaatgactagcagagaagattccagaaaccaccacatgctaggaagacaatatatcaacttcagaattatgattgccagcttgtcatagcataataccacagaaacactttcactggcattaagtcgcaaactgtactgacttgataattaaatacttactctcaacaacatatccataatagaacaagaagagcagattattccagggagaagaagtgatctgctccagtaacacctgaaaaggttatcatctattaaacatcttaacaataatatcaagtacagcctgtcgaccagagctagcatgacttcaatcatggtttcctccagtgttctggaaaaggaccaaaaatagcatagtctaaaagtttgttgctggtagattggagtagtttgcaatagaatttagaacatatttttgaaaaacggaagtcaaaacaactagatcaagatgtgcttctttaacatataagttagttgaatttgtaaagtcttgcacgagaactcttatacatagcccacatgaaatgaagcgaaagatattgcacaggttatcaggaaataattttataccttcttggctatagttttggtatccttcttccctttgaagatataatctaacactttatggaggaaatggccaaaagggccaccataagcaaacccaaagagctacaggaaaacatagtacacttgtcagaacttttagtacacaaaaacatgcatgaaagcatcataaataacagaagagaaagttattgtaggaatggcaatgtgattaaattttgccaagttaccaacatcagagaacaggttagatacaaacttccaagttaacatcaaagaacaggttagatatgaatagatgtgaagcaccatttgttgtccactggacgaaatgtcaagtgtctcatgaagaaaagcaagaagtagaagtgaaaaacaagggttcaagccttgaatagttttttaatactttaatggccatgcaactagtcataattcagcctacaatgtgtaatcaaaattgaaatccaaggatccgtaactctatggtaactgagaccaaaagtagtagataatggcaaactaagagcttgcttcagcctgaaagtatcaaacattcataaatagttggaatgcacaaatatacattattgtggcaattcagcaacacataaaatttactcttttataattgaagtttacaggatacctaaaaatcctcaatgctgtaaagcactaacaactaatttttctattcatggaaactcaatgacgcaagaactgcagcgcacctaagcaaacctcaccagatcagaatgcctgaaactactcgctatacaactcatcagtgtagaagcgcaaggcatctttcaactggatcctctactcaaacaataaacaaatcacattgatatactgcattactgcaaatcctaaatcgaaatcctctactcctacatgagaattctatacacaaaggagatcagcacacgatcagtctcgcagtcataaaggactatactaaaaaaaatcaagaaaacgatccacctttacccaatcccgcaacaaccccgcaggaaggcaggaaactagcacaagcacaggtccgtaccatcttgagcaggaggcggcgcttctcgatcctctggtagccggagagcttctgcgccacggagtcgctgacgccggcgaggcaccccgccgtgatcatctgcacgcaatcccccaaaaattgagcaaacaatcccgcgcgcgcagaaaaccaatcgaatcgaggagcgaaacaagaacgcaccttggtccggagagggtggagctggagctggcgcaggtactgccgccacgcccgccgagccagcgacccctcctccccctctcctcttcccctaacccctcctctccctgctgctactgctgctgctgccatggcggaatccttcaggcctacctcaccctgctgcttcgatctacccaatcaactgctcctgctgctttgtatgctccgccgctcggtgggaagcgcggcgagatctttgtttttttattattattaattaaattcacagcgtcaggtttgggttggggaagaggggagatccgcgtgatgattccgtcgcgtcgcggtggtgcatcgccggccggacgtacggcggagggactcggccggcgggggtgggccgcatagcccatggtaatgagtgggctgggcctaataaaggagggcacttgggattttttcttaggaaaaagttcacccaaggtctctcaacttgtcatcgagttacaaaatcgtcccccgaccgcaaaaccagatatatgacatcctcaatatacagaaccgttcactttaagtcctttggcggttttgaccttagttttgtccgacgtaacggctgagtcaatatgagacccacatgtcagggtggccacgtcagcctcctctttctttccctcttctctcccttcctcatctctctctctctctcacacacacttctctgcgaggctggccggcggggcgaggcgggagaggaggagggtgtcggcggccagcaataggcgacacggtggcagtgatggcggcgacgggcgacacagcggcggggggaggagctgcgtgcgggcgctgggcgtgagtggacatgtgcgcccaggcccagctgctccaccttgacgccacggctccacggctcgctcgaccctgccacagtgcggtgcgccgctgccgcgttgcctgtcgacgccctcttcctttcccgcctcactgtcgacctcctctccactcgtgagacggcctgcctagagaagaatgtgagagaggaggaagagagaggaggctgacgtagacaagctgacatgtggagcccacgtgggtcccacgctaacttacccgccacgtcggacaaaaccggggtcaaacccaccgaaggacctaaagtgaacggttttgtaagttgagggatgtcatacatccggtttacgattggggaatgattttgtaacttgacgaccagttgagggacctttggtgtactttttcctttttcttactatttctttcatggcccttcgctggaccatatatcctctctgtcttactataataaagttatagcctactaatttttaaaacttatcatgcaaagataccacatcgtcatccactcacaattattatatttaagcatcctgcaaacatgctagattatctataatttaataatttattaaattttagagatttaaaagtaagcatgttaaatcatctcacataatccacataatatttcaatatatctctccatcatattttataatatcctacactatatagttcatcatcacttagttcatgtatttgtcttttctcttgttaagtcatatcacatctgttgtttttttgtccttagatgattaatttgtgattcaaattatctctcttctttttttctctcattaagccacatcatctcaactttttagctcttagatgtatggtctaaattattttccttttttttcctctcataaagccatattatcttacttttatatttaaattatcattctacatattatttaaatttaaatcacaattaagccatcattaagttaagtcacgtatcaataaacaggggtgtggggcccacttctgtactgaagtccgggccccctgcctgtgttaaggagcttgtgggaccaaggtcccagcttagcctgggatcctaggccccccacccctccattcttataggacttgcgttcttcattgagaagagcgttgagacccataagatttataacttagagtttgtagataatggagtacccaggacccgaccccccattgcccttgtaggtttcatgctcttccttgagaagagcgtcaattgtacaagatctatttattggattacaaacttagaggggcctggatcacagcctggcctaggattcccccccccccccccctctctccatctttattggactcacgcctcttcactaagaagagcgtagagacctataaaatctacatcttaagattagaaagcaataggggagcccgggtctaaaaaagattatacagataaattaaatattttagtgattaaaaattaacttaacaaatagcttaaaactaaaggtctaaaaagaaaaactaacggctgtgaaaaaaagaaaaccctagacttgaatcttgtcaaattttcgcattgactggcgcatgatgaacctgcaggttgaaagttcgtcacctatttaacataagttgtgacctcagctctttaagcaaaagcatggtgcgtgccattgttaaaccaaaggttatcttcaacaaaaaaaaaaagaaaagaagaagaaaggacatcacagaaatgggagagtctctgctttaccagaataaaaaaggaacaccaaatcttattccactgaacgttattgcttctcgacatagacgcatctaaggtgctccttttccgggtttgtttgaattaaaagatggagagagcaaatatctgctgaataagttactattaggttggtgtatgaggggatacatgtacttttaaattatttaagttcccatcaaaataagtgaattccagagtatgtgggctgctaaggattttgttcctaatttgtggtatgatatcttcggttgagatactgagagtcgtcaaatcaacaatataaagtttggcacctacgtatctctttaattagagcccataaattagtattatcttttttccaacatccaaatgacactttgaacttggtgtttttatttctttttgtgaattaagaaacatgaaacctaaacttatactactgttaagcccaatgcatcttgttgcagaggctagattgatttttattattgaaaaaaaatgatactactagtattgttttcttctggtctaagcagactaattatgtactgtaataaggtactcaatttcctctgttttttttccttgcaggaattagggataaacaagttccatcattacattggatctgctgtttggagaagaccaagtggtgacctgaaaaagaaggtcatttcaaccaccctaagagcaagtttaataatgtagccaactgctggctttaaatcatctagatccaatttagtagccaatttatataatagttacctataaatatatactacataatttatacttggtcccatctgtcatatacacatagatcttagagtatgtgctgcagctgactataaatctatagtctactgtttttctcttttctcttttatcttctcgaaatgtgtttatagttggtttatagtctactattgtacatgctctaatgctgctaatgcatcatgcacttgacatcaaaccctatttaattagctcatctacataggcgagatctcagaatttgaacgtagtgggcaacgggccctgtttagttccaaagttttttttctaaacttttaacttttcatcacatcaaatctttcatacacacacaacttttcacaacttttcagtcacatcatttcaatttcaaccaaacttccaaacttcagtgtgaactaaacacagctaatattattggtcattgtctctagaaagaaggtcactaacgttaaagccataattaatttgataatgaaaaagaaatcctcagtttggtcctgtttgttgtaaataatgctgggagaaaggtaaacaaattagatcctgatcattccaatgctttgcaacggccgatatcactggaagaacactgatgttaaattagcatatcgatatcaaccaacattttatttaggtactcttgtcaatctctaaagcaaaaatgtttggtccgactacgaaactttacctgcaatatgaaataacccatcccctctagagtacactttgaattcgaattaaaaaatatatactacacatatagctttgaacatgtttcaaaataaatttaagaaattttaagtatacttatattttaaactataataaattatatattttggtgtaggtggtaatagaagagataccggcagtatcgatgacaagaaccccgggcagtcgacgcgcaccacaaagacacaggaagaggagagtgcacaaacgccctggtgggttggtggcaggtgaaccacttaacaggtccgcctataaaagcaggtttgttgtcgtagatggatttgttaaaatgctcgtctacgaaaattgttttttcatacgatcctttttttctttcagagtaaacattgcagccaaactatgttatggtccacctagatgttggagcggcttctctgtaaacatcgatctcgtaatagtgatagtgccatgcatacacgaataaacaagggcatcttacaacacagcgattaaaacagcaagaatcgggaaccctaggccatttatccatcgatcgatcgaatagcatcgattcgtcagaacaacatatggctgttcctgttccatccatccatcgatcattcgatacatgaatatatgtatatcgctgtctcagctggtggatgagtctgcagccggcgtatatatgctagctttttctttctcttttttttttccctcaatgcagtatatatgctagctgaacaggaatatattatcctgttcgatcgtatcggcatacagcatacgcatgaaagatacataattcttgtcgcgttttatcgatcgcttcactcgatcgacgttatccttgtatttagttttttattctcctggccccatatatatatatatatatatatatatatatatatatatatatatatatatatatatgcagcaaatatatttgaacaatattttttaggaattgctaaaaagaacattacatagtttttcactcccaaaccatacgaattttggaccgtcggatcactccatgattcaataatattttagaattgctaaaaatgcattctctcctggaatattcgaatttctgaatgtctgattgctttaacattcgggagaccatacgaattttagaccgtcggatcactccaagattcaatactaattttttagaattgctaaaaaatgcattctctcccagaatattcgaatttccgactgtctgattttcttaacattcgggaaaccatacgaattttggaccatcggatcactccaagattcaataatattttggaattgctaaaaatgcattctctcctagaatattcgaatttccgactccgccttaacattcgggtaaagaaaataatagtcgcaagcacgtgtaggagcgaggagtcgagccgccctgctggccagcaggccgtgtgcttggttttttttaataattacacgtgtgttatctttaagtttattgtaatatagtatagttattaaaatataattacactctagttgtactgcagttatacttaaaagttttttaataaaaagatattgtcggcttcttccttcctttctttttttctaagaactgaaatgagcataagttttcataaaaaaaaagtttagaaaaggacttttgtgtttctacccttaactagcgcgcggttgggaattaaaggctggaaaagcaatgaaaaacctcaattaatttaaaattaagtttaaaaagtttgaatttttcccaaagcatataaaaccgataagtgaaccatgatgaatgagagaaataaaggaatagttctgtctcacgcccatctgaggtgatatgctgttgcgcgtacataaatacgcgtacgtagccgtagacgccatacatagacggtagatcaagcgtatagctagctcagacgagtgtgacggcttcgaggttgggcagaggacacgtggcggagtgctacacgtacgactgcacatagttcgattcaagtttttttttttcaaacgaaatactacctcatttccaaaatattattactttgattcatcctaaaacgaatttgtatagaagttatcataacctctactttagattcattatctttaggatggacaaattgtaaagtaaaatattttaggataaaagaagtggttcgattcacctttgatcagtggtaactggctcgccagatggtctgctggtggccaccggcaatacacgtctctgtacgagaagatggcctgttttttctattatactaaggtggtgttcttttcttctgaagatgaagattaagttttttacgtaaaacgagattgtattaacgtatgattgattgagttttaattattacaaacttaaaaaataaattaatatgatattttagagcaacttttatataaaaagttttcacacgaaacgcaccgtttagcagtttgaaaagcgtgtcacgaaaatctttatctccgtccaactcttgttggagaaatgaacgggatgctccctccgttccataatgtagcaatctagatgggatgagacccatcatctagacataaggtcctaagactataaatctagacatgcctcatgtccaaatttgtagtactagaatgagtctcaggttaattgctacattatggaatggatggagtatgtttttgtttctttttctattacacggtatacgcacattcacacacgaccactacacgtagtactgtgatatgtatttttgaagtacaattttatatatttttttcagttttcttttgcttgtatagattatatatataataaataaataaaaggatgacaataaatgttgttacgaaagggatacgcataaactaaaaatattaatattaaagaataatttattctacaatcctaaacaatttcagcaaccctaaagttagcattgctactccattcatcgatatcgatagacaagattttttaaatttgagcatgtaaataatggtagaaagagtaaaatgctagagaccctaaataaatctaactctacaaaaaccacgtaagacactttaacctaatctatccagtagattttttttaaaggatttcataaggaaaaaccttacaagcattagcaagagcaaagatgaattgctcctcccctcgtcatactgactagagtggacgatggaaatgtggagccaatggaggaaggggtctagggggctgcatgatgggattgagaagtcataaggacgtgatcactgagatgtgtgttccatatagctcatgagctcacatgtcagtgagcatgtcatgtggcagtttcacgttagaggatccgctttcgacatgatgtagtcccacggtgcgagacacaatgctaattcaaacaactgctatctatataaaatttcacattatagaatgcatactccattgattccaaatatatataggatgtattattagtcgtgtacacttgtaacattgtactttcaatataatttctttcatgatacaaataaggacatattatattttggggtagatctaggtagtatgttgcctacaaattatcaacgacacgtttatagaacaattaataattaattaatgatttcatcgacaacaatgaaatgatggcatatgactgttattattacaattattagagcaagtttaatagtatagccaattattggctccaattcatctatagctaatctaatagcccattcatacaatagttacatactacactattaatacatggtcccacctgtcatacacacactgtgtcttgaagttcgtgctacaggtggctacaaatctgtagcccgctgctcttctctctccttatttatcttcttaaaatatgtttacagctggcttatagcctgttattgtacctgctcttataattacaatgaaatactactccctccatcctataatggagtataagtcatgcatgcatgcatgtaattaatcgtgaaatcttctccattaaattattacatttttaaatcctttactctcacattctctaattctattggatgcatgcatcatatttattaggatgatccaaactacaacataataattattatttcttagtctttgggttaagggtgattatactttatattttggaatggagggagtagttcttttctactccctccatctacttttgatagtcatatttcatcttgacacacagaccaaggataattaattctacttatcgtccatttaaatatactactagtcattcctcgtaaacaagcgatttattaatatttatatttctcaatgcccatgtagccaatcatgtgtggaagaatgaagagtcacgcattaaattcgagaaaatcattaagaggataagttgttggattgaaatatgcctatcaaaaataaaattttcaaatttaaaaatatgactatcaaaagtagatgaaggagtattaatcagtacaattattccccactcacatctttcatccatgtaaatataaattcaacttagcgaatgttttcgctggctgccatcgataatgcttattcgtgtttttccttatcacgtactcccacctatttgtataagttaacacatatatattgaccatcgttcaaaagtttataaaatataaacttataatagtatataatttttaataataaaataaatcatcacaaaaaaatgatacaaaacatatttaaaaatcgaacagtgtcgtaagtcaaaaactccatcccagtttgatcatcttctaagcaaaggacatcaagaccaataacaccaaaatattcatcattctcaaattaatatttatatgatttatatgttaagatgctccatcgcttcgtatcccgtggattactcatgttttaaatattgcatgtcattgtactaatagatattaatttttattggttccatgtaactacacatttactttttacacaaatgaacaaagacacatttattagatgatgattattttgagaaggtttcttaggatgataaaaatgtgaacggaggggagtattattgtaggcaatggtcagcgaggcagcatgtgtcccttacggtttttttttttagaacactgtgtcccttacgtggcgacctaatttaccgtctcccgcgaaacccggacaaaggcaatcccgccacgtaagcaccggccgttataacggcattcattcaaagcggtggcgggaatggtgcttaagctaactcaccaacacgtctccttcccgccacaaatcccaagaatattcccgcgaaacaatcctttcctctcctctctctcaaatcacaattaatccaacaaaaaccgcacttaatcccaaccggcagaaaaagagagaagaagaaattaaatcgatctcttcgtcagcaataatgcggacgccatcacggcgcattagctagatactgctgctagcttttgccgatcgatccgagctataaatacatggccgccatggcgatcgttcgacgcagcagcagcaagaagaagacgcgacgacgtagctagctagatcgagagatcaatggcggcgagcggcggcggcaatggcgtggtggtggtgttcgacttcgacaagaccatcatcgactgcgacagcgacaactgggtcgtcgacgcgctcggcgccaccgcccgcttcgacgacctcctctgccgcctcccctggaactccgccatcgtaagcacctctcgccgccgccgccgccgccggtggtctcgctccgacgagctgacgaacacctgatgactttctttctttctttccaggacgccatgatgggggagctgcacgcggaggggaggacggtggaggaggtggcggcgagcctgagggcagcgccgctgtcgccgcgcgtggcggcggccgtcgagacggcgcgcgcgctcgggtgcgagctcagggtgctcagcgacgccaacgccttcttcgtcggcgccgtcctcgaccaccacggcctcgccggctgcttctcggcggtcgacaccaacccggccgccgtcgacgccgacggccgcctccggatcctcccctaccacggcctccccggccatggctgccccctcgccacctgccctcccaacatgtgcaagggcaaggtcatggagaggatcatcgacgagctatcctgcggctgcggtggcgcgctggcggcgaggaggaggagggtggtgtacgtcggcgacgggagaggcgactactgcccgtcgctgaagctgacggagatggactacgtgatgccgaggaaggggtacccggtgtgggacctcatcgccggcggcgaccgcgccgccgtccgggccgacgtccgcgagtgggcggacttcgaggacctcgaggcggtgctgctcggcatcgtcgccgagtgcctcacgtcggaacacgacgacgccgacgacgatggcggcgaggcggcgccgccggcggagtgccgtgcgctgccggcgacgctggcttccggtcaggaggcaattctgcccaaggcagttcacgtgcctaattgactgggccagatgatagattaacgaactagtattaattaattaattaattaattaattaatcaaacatgcttaagtaattatatattcagtaataaacttcacctgtgttgttgcaagatggtgtgaggtggatcatgtaagagatccccattatattgtgctttagcttcaccaaatggaagtgttttggtttggtgaatggtgtgagatacattcagggtaactgaaattgcgacaccattgtaagaacgcctgaaaattcattctactggtagaaattgatattggtctttttgatatcaaattcatcgatggagtatattcttacacatttgggaatggactccgatgtctcagggaatgtttcctcttgtaccttttttttctaaatctaatatagatagttggcaaaacttatgaaaaaaaggaaaaaaagataatgtagagtgtattgaaatttatcggtacactacaaatcaagtttaaaatcgacctacacattaaaaaacaaattcgagcgtgaacagttccactactattacaaactggatttgtcttttttatttcaacatgcgagttaggtttggacctgccttttcgagaaaattccttatctacacatgagttttcgcttaatcccttacgtgcccctaaattttgcccccatcctctgtatgcccctaagtttttatttcgatcccttctatatccatgtcataagttgactgtgaattgaccgtaaaatgactacattgcccttccattgtactttatactttataatttaaaaacataagtctcgttataaaaaaaacttaatctaaaaatcaaaaagggacatgattattaacatcggatttcgaaaacaaaattaatttttcaaacattttttcaagataatgaaatccaaaaaatgttttattcggaattcgaaaaaccaaaattgtttcttatttgggtttaaatttcagtgaaaattttcaataaatttcatcaaatccgatttgaaacttatttaaaaatctaagtcttagattaagtaattatggcatgtttgtttttacaaacgaatcaacttttacattgggagccatgtttttttaatcaactactccgtactaagcaataagtaagacacaagggtaatataggtatttttgaaaaaatctaactgtcgactaacagtcgacttacggaatgggtatattatataaggcataaaaataaaaactcaagggtacgaaggggataaggcaaaattcaagggcacagaagagattgggcgaaaatttatcgatacgtaagggattttctctaagtttttttagagtggtatatgtacattgtatgactattgtcacaaatttttgagaatttttcacaattatttagatgatttttaaacaaacgagaagacacccccttgagggatcaaaacagcttccccgcatttaagggggaacaaaataattttcccacgtttgcaaggtgggttccactaccatatacccaactcttcgagcatagaaataattggtgcaatttaaaatgtattttttaatctgatattaaatcatatgcacatggaacataatacagggtaagagttacacatatagttttgttagagtcgatttagacacactactacataaactcaaattggtgccggttgggaaaccctcttaggtgccggttttcccagctggcactacgaaggcggcacagatgacttccgtcatcggtgccgggttccagaaccagcacctttgtgatctctggaacgcaaaaaaaaacggcttgatgcttccagcaattcccccctcccgttgaaaccccttcaacccgaacacaagaacacaacatgagcatctaagaacacacatgaacatcaaaacacacaagatgaacacacatgaatacaagatgaacacaaacaaacaggaacatcccggccgaatctggcggaggagaggcaccgccgctgggctgtggccaagtcccctcctggctagatctagcggaggggaggaaccatcgccgcctccgctgtcaaaccgccaccgccgctgggtggggaggccgctgccgagcagtcgcagcccctcccaccgttgccgactcccctcctggctagatctagcggctgtcgggtgccagcgaaagagagagagccaagagagaggagagggtatgagagggagagacgggtgagaggaggatagggggggcgagtggataaggacgccccctcaactcccactcggcaagtagataaagcctaaaaagaaaaaaagggctgtctcttagctcagctcggctcgtttggtaaaaaaccgacacctttaatatattataggtgtcggtttttaattaaccgacatctatagtatattaaaggtactgttttttttaaaaaagacacctatagtatagtgtgggtgtcgatttttctatagaactaacacctattgtacattaaaggtgctagttttattttttttccatcttttgaagggtttttttttcatcttttgaaggggaaaagcactataagtgcctttttagcttctccggcacctatttgtctttatgtagtagtgacatctagtggctattttgaaatatatgatttttagctagaaacagtaaaagcatagtaaggatttttaaaagcataggaatatgatatcacgctctgttgaatctagaagtggtgtcttctgaattattcgcatgaagtaaacacgtgaattttaataggatttgcttatgttagggagaggaaggaagagattacattgggtatataataagaaaaacaataaaaacttgtttgagctcatgtttattttcttatggaatcggggatatgaaaggccaatccataggatttctggcatcatattccactgtttcaaagggtaattttgggatttttccaagaatttaaaaccaccataaatcctataaaaattatttaatcgaaaggagcccgctagttgtttcacaatcattagattgttgtggttgcaaactcatgttttgcaactctatatatcttttgcgaaaacaatttttcaacctgagtaagttactagtagtaaattattattttttttgaaatgatacacatatcaaaataaattctcattatccaaaaaaaaaccaaaataaattctcacaaactctttaggaaactgatgtggtaaaccgtaatgtagaatctgtttgacacggttctgtttgataaaatttgaatggattttttttcttttttacaaagaaccccaatagaacgggacgtggctgctcggcaccttcgccttcgcgcaccgcagcttgacaaatctcccttttcctccccctgactactttatcctttattatattccccccacacggtccacgtggcccgaccacagtcgcttccatgtgggccccacctgcccccccctcccccccccccccgggggcacgcacgaaactcctcgtcttcttccgctattactattctccctcctctttgcgtctctccgcctccgcctccgcttcgacctacctctcctcctcgcgttcgcttctccccccctctccccctccctctcccgcgacgaggcgggaggcatggaggcgcgcgcgcgggggcgggaggcgggggagggaggttggggcggaggcggaggtggcctgccgctcgccgtgcgggagctcgtcgccggcggggtggcggggggagtcgccaagacggccgtcgcgccgctcgagcgcgtcaagatcctcttccaggcacgtcactgctctcgatcgcttgtttcaattccttggtggtagtagtagcggtttgggacggcgcccacgccgattctttggttgcccctacgcgcgcgtaatgtcgcatccaatccaacgcggaacgcttccttccatgccgatgtgctttcgccccgataggcgacgatgatgagacgcggctcctctgtgtttgtgtgtgtgtggctggtgtagtccaggaatcttgggcgccgaaagctgtcctagttgcaattcttgcagctatctctctgttgttttttttttctaaagaaaaagttaggaaaaagttatatgcctttttgagtcgggggaaaaaatctttattgtgagagatggaatgtttttggtatttatcagtgcattctttcggaggggcacacctacaccggacacatgaattgggtgctttgatcagggaaaaaaaatgcatgtttatacattctttttgggctgctagtagctctgatataactgaacaattgaaggagagctgacaggaaggttatgatttaagtggttcaggtgttggacatgagttgaattgtgaccccagtttggttcattccccatgtttgctaagtactacatggcaatccctttctgaatacacgtatgtattaaaaaaatgtactgaaatttcttgattaataagttgcaatctttagaggcttgcaagagttcgaatgtctgtcagggattcaagctcagctgagttattagatgatcactatatcatgtctgtttttttttttttggagaggaaaggtcactttgcagtgtcatgtatcaattcagtgaagctaaaataacttttataaggaggaaattttttgctactgttcgataattttctagtagtggagttggacatccttgagtaatcttgagttcttgacaaaatcatatactggaagtctggaatatatttggaaaggagaaagccccacctaaatgtattgggatttaacaaacatttctgatgacccttatgtgaaaatagttgactgcagtatatggttcgagtacgagttttgaattacattggacaataaggatcagaattcatggtggtggttaagaaggcaacaagaatatcagaccaatgccagggagttgaatcctgtggggatttccacacacaaggaaattggaagctacttgtctagccgagcaccattgttctctttttcttttcttgaccaaaaacaataggggaggcccctacgatataaaaagataccattgttctcccgataaattaaataagcaactgagtgcttcattttgtgaatcgggtcatgtacataaagaaccataccttgttcataatacttcagtctacaactggagtgttttgatgtacaatctgctttgatgtgtttgaacttaaattggttatagttcgtacaaatattaaaaagaaacaacaacgatctcaaccaattagtagtttgttgtcactaccttgaaattcatgatctcatatacatacaattagtagtttgttgttactaccttgaaattcatgatcacatctctatgtcttaggtagtcctctgacatttgaatgtttcttttggaactttcagactagaagagcagaattccatggttctggattaattggatcatttcgaacaatctctcgaacagaagggcttttagggttttacaggttggtcttgcctgctttgctacttgcataatgaatgacaattgcactgttgagcttgactttggaatcttcccttaggggaaatggagccagtgttgctcggattgttccttatgcagctttgcattatatggcctatgaagaatacagacgatggatcattcttggttttcctaatgttgagcaaggccctattcttgatctagtggctggatcaatagctggtggaacagctgtcatatgcacataccctcttgatctagttcgcacaaagttggcttatcaggttggtcttacaccttgcacccttcattccagaggaaatcacacttcttcaagggagatttcaagctgctcctgatgtatcacacattaacaagctctctgaataatgatctaattgacaccacaccactctttggcaatgttgatgttgtggtgttagagaacctactttctatgagtatatgacccatttccttatttgtggagctgtactgttaaatcaatacattgtctgataataatttatctgcaggttaaaggtgcagtgaaacttagtttaagagaatataagccctctgaacaggtttataaagggatccttgattgtgtcaaaacaatatacagacaaaatgggttaagaggcctatatcgtggcatgggtatgcttattttgcatttcatattttgctaatttacaactactgatactattgctataacaaagaatttggtttttcagctccatcgttgtatggaatcttcccttactctggtcttaaattctacttttacgagactatgaagacttatgtacctgaagagcacagaaaagatatcattgcaaaacttgcctgtggatctgtggctggtttgttagggcagacaataacatatccccttgatgttgttaggcggcaaatgcaggtacgattttcttcggcatggggttataaattgttttgaatgctctaaagaataatttgggatgaattgtttccaggttcaggccttttcatcatccaacctagaaaagggaaaaggaacatttggaagcattgctatgatagcaaaacatcaaggttggcggcaactgttctcaggattatctatcaactatttgaaggtgagaatagcctttcctgtgtcactaatagtttatttattggcattttgtttggaaaacattttttcgctgccgacaaatatgaagacatatgaccatgagctggggtattgaaacattgaaatcccatttgtcttaaatgtagaacttgacttttaggcaggctatacttctcatacgtcccatatgtgtagtcactatctcactgaaagcaatgtcttagggtcatttgagaatctatgatgttatgtcaattatttaattaatttcctttgagctgttcatgagttagaatacttcgtcgataattgctgctgcttaggaactatatcaattagacacttcagtatgtgcttttatttatgtgcaatgtggggaaaaggtgggttatggatatatatggtatttcacaatcttataattataaaattacataagtaatgttcatctccttttgtgttaagaaggtacctctctagttaaggctagaggcaaagtatatcttcacaagtctctttttgacaggtggtcccatcagtagccatagggtttacagtttatgactcaatgaaggtttggcttaaagttccatcgagagaggacacggctattgctgcgctgacagaagaaagaagtaatgcagcccctgctcactccagttagtacaaatcatactcttttggtggtgcaatccccttcattgccttgatattttcggcatgtaacatagcattatttcttggggctgttgtaccaccacaattcttaggctcatccaacatagtgcagaaaataattcggccttcaataagcccataagcggcatggtcacggatgcctaaagattggcatttgactagagatagaattctttgctgattctaggggaatttcacaatgtacagattctgtatataattgaatacagctagtagcttgtatctaactgaaagcttagtaaattcacaatccagagcctttcaccaatatctgtacactgactctttttaaagacaactctgttagtatttccttcagcaggggctgagaatgagatttcctgttgccataggtaggtttctaggagtaggttgataggtttgagtgtttgcttgcagtttttgcctgaagtacatgcatctatcatgccttgctttcagcaccttgttggattcttgcaacacggctcctgttgggcttgagctaagattcttgcaaaaattcagattccttgactttgtggcctctgcttgtactgactctttagagttgttccaaagctgagttgcatgatgaaaaaacagaccacaatagctgtggagaatggcccatttaactacttataagatataggagtactaactgactgatgtgtgaactttttgtgagcttctgtaattcttacttcaatcggaattttagcttccatccttacttaggactgctgatgtgtgttcaatctgaattgtagcttccatctcaacaattctgtgctaatgaactgtgcacagcaacgtgttgagctgtaggctgttagccttttcccttgttactgttattacagtggtagtaattgtttcagttctctcttatggcttgtctgggaattcataatttttatgtttatttccccgacaaattaactacgagtgctttgtacgagtactagtttgtactagtactacataatttctggcaaatttctgtctttagtcttcatcaatgaagatcaggctctaaatctactggcaattagcttagttttcataatttctgtcctatttgcaagaaagaattcttcagtaagcatgagccaactagacatgcaattttagcttttccaaactacaccctttgtctcagaataactttatttttatccctttcatctgttctaaaataaggggttgttaggatggggatttttttttttttggcatttgctgcgggctacaacaattcaaaattattgcagcttgcaacgcctttgaactaccacagctttatattgatatgtggagaagctgaaaataaacttatttcgagaataattgttgtgagagtggacagcattttggttgatgttagcagttggttaaagtagatactggagtacttctacatgaatactaccacaattaagaggatgtttggtgtatgtactgacattgcctagtattgacatagttttcttgccaattttgtttaaggttaagcgaacaaaatttggcaccatattttgactagcaatccacaaccttgccacacttttcagagatgatgtgtgggatcaaggtgctagaaatagaatctcgccatatgtatggtaatggaccaaatacatggctaacttagtcaaaactaactattgaggtgtggcaaagtgtggcaatgtatggtcatgaaccaaataaccccttaagtaagttgaatattataaccaactaatagctctaaattatctatagccaatctaatagctcactcataccatagttacttataaacatatattacacgattaatatatgatctcacctctcatacacatagtgttttggagtacgtgctgcggctggctataaatttgtaacccgttttccttatctctcctctcttagggtattagcagtgggtcacaaatatttgtggagcctcgtgtgccaacttagctcaagaacacccaagaacattgttagatacatgctccacggtgcatattcctttgagtgggtcccaccagtctttttttctatcctcactttccatctctcctctctctctcctttatccgttccctaccggcggaaggaagcgaggtagcggcgctgaggcggaggaagtgagcggcgaccggagtggcagtgggcaggaagccacggcggtgttcgacgttcctctctccaggggcgaggaagagcggcggcggagaggaggacgacgtcgccgctcctctccccgttgtggccttcccccttttcctctccacaccggcgcggcctctccctctccggtgtagatctgggagacgggccgacaagctcggcgtcgcggagaggaggcaggcgacgagctcgatagcgcggagaggaggcgggcgatgagcttggcagcggaagaggaggatggcgacgacgatggcctagtcgatctaatagctcatccatacaatagttacctataagcatatactacagcattaatgtatagtctcacatcttatacacacacaatatattggagtccttgctgcagcgggctacaaccgctttccttctatctcttatctcctctatatgtgattacaacttacttgtagactgctattgtactcgctctaagagcaagtttaatagtatagctaactacttactccaaatcatctatagccaatgtaatagcccactcatataatagttatctataaatcattataaatcattaatatatggttccaccttttatgcacatataacgcaatggagttcatgctacagctagctacaaatatgtagaccgctttctttctctctcttctcttctctacttcacatgtgcttacagctgacttacagcctactattgtgctactcggggtgatgtgttacacaaagatctagtactccactctccctaggtaggagtactcctagctactagtaggggaaggacaggctagggcctaggatccatagggcataggctacaggcaaaaaccttcctgcagtgaatcacctccatgtgcagtggtacaatgccatgcacagccacagcctctctgccttctctttgctcacctggatattctcatccttcacactcttcactataccacacagtacttgtacgagtatgtgagctgtgggcagggtattgtccatcaatgcacaatcagctctgttgttagcactattagatcaatgatttgttttataagaaaagatataacgaaataattgctccagagtatatggtcactggtgcattctttggaatagagaaatttaaaaggattttgaaagggtttcaacaaattcatgtaaagttcctatgttcgagcgaaacattgagaacgagaaacaatgctactcacttgtcagttaatgatgcacacaggtggtgcaaattgttggcttatcaaacgcgaccaaaatttattattttaaaaatatttttaaaagttgactttgggtcctttgatagtagtttgtattatattctaacattcgtactccctccatctcacaatataagggattttgagtttttgcttgcaacgtttgatcactcgtcttattcaattttttttacaaatatataaaatgaaaagttatgcttaaaatactgtagataataaagtaagtcacaaataaaataaataataatttcaaaattttgaataagacgagcggtcaaacattacaaataaaaactcaaaatcccttatattatgggaaatcgctcataatgaattataatttttttactgcattagcctttcctcaattcccttttcccgagggtgaaaaaagaagaagggacaagaaaaaggggagactctccagtccagtctccttgattttggagctcatacactacacagtctactacagcatgcatagccttcaaagcctcttttcacccatcttggcacagtgacgtgccaatgattaccacctccatacctgcattagaaactagcccatcattccctaacaggccaagccctttgatgatgatacacattgatactccttcctactaggagataattaaccattatcacttttacacttgatatttaacgatttgtcactaaattacgtacgagaactcacatgttataaactatgagtgacaaattattaaatgccacaccttaaaaatgacaaatcctcttgtccaaaaccaccttgttttgtctagcaaaagagaactccacacttacacgcctgtttgaaacttggagaaacatatttaacagcatgtgaaatgggatggtctattagtatatgattaattaagtattattataaatttaaaatatatttatttgattttttgtaaaacttctatatagaaatttttttacataaaacttacctttaagcatttcagtaagcgtgctaaacataaagaaaaaaaagttgaaggttggatttgaagttcagaactcagtcaaggattgtgctgacagctatgaatatttggattacatttgtttaacttcattgttatttggaaggacatgtagggcatataaaagttgacacaagtggagagtactttgtttattccactggttaactttttttaaagattttccactggttaaccactaacttgaaagattgccgtctcacctgcaggaagtgaataaccaccaactttgaaccaattttgtgatttcaaccccttcctttgtaggcatctttggaacatgtgtgggtaaaactgtagttttcaaaattcaacagtttttcaattgtattgtttcgacgctcgatacaaagaggatagatttttttagaagaaagatgatagatttagaatagagccaatgataaaattttcaaggtggccatattttgttagagagagaaggtccatgttagtttccttaaaataatatcttctttatggaacattccataagaattttgtgaaatttccctttggaaaaggtcaatccgatgatgtagtaagtcctttgctataataattcttatacaaatgtcttaacccaaatgaagataaacatatggatttaaaaaaaaggtgaaaattttagtgagattagtgtttttttttttgcggtggaacctgtcaattcgggttcaaatcctaggcttggcagatgttcgtatttatagctaattattattttaattgctaggtgacgtacccaacaataggaatctatgatgatttcatcgattttaagatttattgtcccagtctcttagatgtgctcatctctactattataaaaattaaagacgtttgtgctttatttgataatttttaatttcgtttgcttttagaaatgcatattcgatttgagtcagtttttaagttccacgcataagaaatttctttaaaaaaactcacatgctaatttgaggcgatcggactcctaactgcaagacatgatttttctaaaaatatatatatccaagtgaatcctacagtgaatttcaggaaccaatccctgtgcaaacggtggtattcactatctgttgctccctggcccctacccgccaccattaatggctccccagagatctactactacccactcgatttcgctgacctcatccaccccctgcaatcaattctgcattctctctactgtactgtactactataggagtacagtatagtatctctatggctgttgtatggtgtacactgctgaaaggctggtatagtactgtctactgtagtgtacatgttataccatggaatgcatgctcacccccccccccaacatgttgtatagtaagccatgtcatacttgcctaccgtgtgtgtgacgaaacaggaaaaaaaattatcgagggtctaatacattgataggaaaaacacaggaattaaagtagaatgcttctcaaattctccgggaacaggaaaaacaataggagtcctttgatcacgccataggaaaaacataggaaagttcacaaagagatcatattttcttgctatttttcctatgaaatgtgaaacataggaatacaattctatgaaaattttcttttctttcttatgaatcaaaaggacatatagggaaaatccatagaaatttaaatcatatgaaaatcctttgtctatcttatgaatcaggccctaaatatgttctaaaatataatagcttgtctacgaatttaaatatgcggttgtctaaatttatagctagaaatatttatattttgaggtggaaggaataattatttattggtatattaattaaatagtataaattaaataatataggtcctatgactccgggaagtagtatgcaggtacgccattgataaatatcatcactaaaaaaactgaaatactattccaagggtccctttgaatcgtaggaatgaaaaaacgtagaaataggaaaaacgtaggattttgatagaaatattaatgtaaaatagatgattgcaaaacattgacaaaaaaaacacataaatggccatttaattggaccgcaggaaaaacgtaagaattagagaagagatatagatttaaaagaaagtttccatgaggtagacatgtggttctacctcatgttagaattgctccaaaacttgcatggcattaggcatttcataggaattttataggattccataagatccttttttttattcaaagggcaatatagaaaaaattcctgtaagaatgaaatcctctaaaatttctatgaatttcctttgaattaaaggggccttaagggtctctttggtttcaaatcacaggaataacttaggaatgtatgtgcaaaaaacaaaataaaagattagaacacatgaaattttccttcaaaaaggatggagtggatgatgtttttattcctatagaatcagcacattttggaggattggcacatgattcctatagaatttttttctttgaatcttatgtaccaaatgtatgagtagtgttaattctagaggaactgggtttttctatagtttcttctccaaaccgaataagatctaagcttgttcagaacttcatattgctgaggctgttttgtagtactaactccgtcccaaaataagtgcagtcatagatatgcgtgctgagcgttttgaccatccgtcttatttgaaaaatttatgaaaaatattaaaaaaattagtcacacataaagtactattcatgttttatcatctaataacaataaaaatactaatcataatcttttttcaaataagacgaacggttaaacgttggacatgaacagtgctaaaactgcacttattttgggacagagggagtagtaatagtactagagtactagtattaccttggtgaatagtatataataatataagtgatgaacaaatgtgaatttgtgatgaacaaatgcagtttactcctccaataggaggatgctagtgctactgtgggcactgggcagtaggagtagtacactcgtttgtctcaaggtgtgtggcaatttttggtgctgatgaggagaggagcacagcctctgccagactgccaacacagcaggcagctgctgccctcagcctcagctctcagccctgcacagagattccagatcttttggctgcctgcctgccctgccctgcctgcctagcttgatcatttttgcacagagcacacagaaatgaaaacatcaacctggtgtggtgactggtgactgcctgactgctgaggtgaggtgtgtgtcgtgcatgtgtgtctctgaaaaaaaacaaatgactttttaattcactaccaaaataaaccttagggtgtgtttagttcacgttaaaattagaagtttggttaaaattaaaacgatgtgacggaaaagttggaagtttgtgcgtgtaggaaagtttcgatgtgatggaaagttgaaagtttgaaaaaaaaagtttggaactaaactcggccttactacttcctcgatcccatatttttaccccctctcatttgtccacaaataagttaactttagagtgttcattgcatcagagtttatgaaaatatgtaataatcgtatatttgtattgagggtagataaagtggtaatagttgcattgaaatttgataaactaggggtattctagtatttttgagtttgtattggtatgtgtgggatggataaaaatgaacttattttaggacataggtagtatcaaattttgataagttaataaatttaaaataggattgttacattgtactccctccgtttcacaatgtaagtcattctagcattttccacatttatattgatgttaatgaatctagacatatatatacatttagattcattaacatccatatgaatgtggaaaatgctagaatgatttacattgtgaaacggaagtagtattatctgccaaactctatcaataattccgaaaccttccactgataaaaactacacaaaaatttagtaaggtatcaaagcaaacaccaccttcacatttttttttaccttatcaaagattgagattgctaatacttggctctaccaacaaatgataagttttttttttgcagaaaagtgaacatgcccaaagcaacaaagatgtggagtattttcctgttttaaaagaaattgatttttatccttgattcataaattgagaatttttatttatttaatatatcttatttacctaccgaccaatgcttttttttctattaagggacacttgaatattttttagtactaaagttttctcaagatgccagaatgtttttattttagaatagagaaagcaggcacatactagagagaactagagaggtgtgtccttcaaaagcctgcacaaagtgtagtgctcaatgatcccacaactttcacaaacactagcccacaatgctctttctctcttcccttctctctctctctcttgtcttcttgtgttacaacaagatcagagcttttgcatgcatccatctctgattgatatgcatgatcaggcacacagccccccagggaggagtgcccttgttgtagttttgcagtgccttgcccacaccctgctgaaaagaggccatataaagcagcatccttggacccattgcctctggcctcccaaacatttttttttttgcatttttgcttgtgtttgtttgctcaagcaaagactgcaagagaagaatcaaagtgtgcaagcaacttcatccctatccccctatatagacaggtaaatctaggagtataatcctcttgagtcttgtcctggttcttggatctctctcacacagtgctgcatgcttccttccatgaatggattttgattagtttaagcgaaacctaccttgcttgtttgagtgtctctcaatgccagcactgtttaactgtagtagaggatgagtggtgggacagtcatttagtagattttaggcacatgcatgatccacatttttataatgcaatgttgtattttggattaggataactgaccaatgagcctatggtttgcctccccagtgaccaatcattaggtgataaatcccatatgcttttgtcaccactcctcctttacactgtcccataaaaaatctactcctatctaagatgagatgtgatgttgggtatgtttagattcattatgctataaaatgtcttatcttatcttttatgaaacagaggaagtagtaataagccataggtgtatgccctgtgtttagaaaaccgatgaaaaccggtgaaatccaaactttcttgaccaggtcagaaagctacaaactactcggtcttttggtcaagtttaaaattttcaaactaaatttaaatttttgtcaagatttatctatattttatcggtttataaatggttttaatcggatagtgaatcactcggcatctataatactcctacagtagtataatgagtgagctactactagttgtgtatgggcaccaacaccttgtcattggcactttgcctcctgagtagggcccattggttctttgatagcctctcctccaaggccaaaaaattttctgacccagtgtcaaggtcagggagagctgctcccttgctggccttgagatgtttgcattggttttttccctttccctttctctttggtggtcattaggcctacctgatactacttgtagtgagtgagtgataagttgataacacttctccctgccccaattgtttccttgttcctagtagaagtagaagctggaagctggtctctttgggttttggaaggcttcatctttccattttaggtcctgcaagtgtgctcaacaactcaagcttcactgtcttcttggtttctacctctggtatcagctccttttgttcatctttgtgatgcattgtgttattcaccatgcatcagttcatctggtattttatgaatttatcaaatgagaacagaaaaagaaaagattcttgttttaaaagttggaagatcagttgtatgttagttgcaagattgaatctctttttgttccaatggaacaattctgtgaggatctatttgtggcttgtactgttgattcttttgctactgtgaaggtaaaaactaaaagtggtagtagatgaaaagatcaaaaactttgatttcaagggtacacctagtacaagcctgatttgtcaaaagaacaacaaaaatctcgtgaagaacagtgtgtctgaatgtctgatgcgtgtgtgctgctgctgttcttcttcttcttctcaggttttgattattatcactagtttctgcaattcttggagatttccgaggcggccatgagcggcaatccatcgttctcgcagctcggtgcggtggacgccgccatgaacggcggctacttcatggcggcgagcggcaatggcgccgacgtgccgctgttccatccggccatggcgccgccgcatgatcacggcgggagcttcggctacggcgacgcggcggcggcggcgatggacgtcggcgcgcacttcgcggcggcgaacaacctcgtgctcgcgtccctggcgacccagctgttcggcgccgcgccggcggcggcggcgcacgggcatggcgactacctcggcgcgacgacgccgccggaggaggagatggggggcgggtacgacgtcgccgtcggcgacagctccggcggcgcggtgagcctcgcgtgcctcggccacggccagccgggcgacatggcggcggggtggtgctcgacgtcggcgaggaagccgagctgcaactggagcagcagcaacgccggtgtgcacggtggttcgtattacctcgccggggtgccggaggctgccggcttcgtgtccgcggcggcggcggcgagcgagctgtcgctgagcctgtgctccaagtcgtcctcggacagcatgctcaacgccggcggcgaccagtgctcgtcggcggcgagccgttccgggctgacgcagatgagcagggtggtggtggtggagcccgagccgccgctcgtaccgtactacccggcggcgaacttcgccgtggtggtggcgcggtcccgatacgccgcggtggcgcagcaggtgctcaacgacgccgtcggctgcgtgctgggcggcgtcgcggacgccgccgccgactcggccagcggcgtcgacagcggcagctcgaggccgtcgagctgctcggtggccggcggcgcgccgtcgtccgccgtgagctccaacaaccagctcatcgcctcctccggcgagcacacgcacggcggcggcgacgcttcggctcagcggctcaggagcgagctcctcaccatgctccagctggtgagctcgcccttctccacacgactcccgaggcatcagttcaagcaaatttcgtactaccatttcgaatcaaatttgaaaccatcttttgacgacgatacgaattcaaatgcgcagatggatcagaagtacaaccaatgcctcgacgagatccagagcacgacggcgaggttcaacaccctgacgcacgccacggcgcgcgccgccgggatgagcagcagcagcatctgcgcgccgttcgcgcaccgcgccgtgtcggcaatgtaccacggcctgaggcgccgcattgccggcgagatcatgtccgccgccgccgcggccggcaggccttgccgcggcggcgagtcgtcgtcggcggtgaccggcggcgagagggagcggagctgggagtcggcgttcatccagaagcactgggcggtgcagcagctgcggcgcggcgagcagcagtgctggcggccgcagcgcggcctcccggagaagtccgtcgccgtcctcaaggcctggatgttcgagaacttcctccgcccgtaagcaccacccacgccgccattgacgccgatcttgccacatcacgcatttgatcgaacaccttcatcaaacaatctgattcgattcatttttggtgttcttgcgtcaggtatccgaaagacagcgagaaggagatgctcgcagcaaggagcggcctcagcaggaaccaggtaatactccctttctaaatatttaacgccgttaactttttaaaacatgtttaaccgttcgtcttattcaaaaatttttatgaaatatgtaaaactatatgtgtacataaaaatatatttaacaacaaatcaaatgataggaaaaaattaataattatttaattttttgaataaaaagaacggtcaaacatgttttaaaaagtaaacggtgtcaaatatttagaaacgaagggagtactatatacaactcatttccaaacttttgtcaaacaaaaatgattcgtaaaccaaacgcttctccgcattttcgacgaaacaaaactgcaaagatgataaatcatagacccagtgatcatgttcttggctgaattatattatctgaaaacacatttgttgtactacattttagcatgatttttttgattttccgtggctgattcggtcgatttgcgcggcgatggtaggtgtcgaattggttcataaacgctcgagttcggctatggaagccaatgatcgaggagatgtgcgaggagctgaagaggagctcgggtggtggtgctggaaatcaagctctagcaatggagcatatgaacagccaagatgtggtcagttaaccagttagagctttggcttggtttgatggcgatgttagctgcggattaagatcaatcaatgccattgatctatttatcgatcaccaattgtaactcagtttaattcgatggtttcagtatatataaaagctgccggtgcagtgatcgcatttcgcggtagatcatgagcacctcattgggagatcgatgcgaattgctgagttttcagttgagtaggctgcagtaaaaaaatcagttaaaaaatttgggattgattgttgttagtactacctcagttccaaattataaggatatttaggctatttagtaaatagttctgaggttggcaatttttttttttgaattgcgtacgtcttaggggctcaagatccgctcatattttcacattgttgatgtcctaagatccgctcatattttcacattgtgcatttgattggctatggaatcattgaaatgatgggattcattggaattagcacaaaaatacatttatattatggtataaaatttaaattctagaaatccttatactccctccgtcctatattataagggattttaagtttttgtttgaactgtttgaccacttgtcttattcaaaaaattttggaattattatttatttttttttgtgacttgctttattatctaaagtattttaagcacaacttttcgttttttatatttgcacaaatttttttgaataagacgagtggtcaaacagttcaaccaaaaactcaaaatcccttatattatgggacggagggaatattttttaaggggagcagtaaagtatttctggagctagcgcgaatgggaggatgacctctttagcatggatccatcgggtaatcatgcatctatgaagtgaaatttgaatggatttgggattgccaaggtacaaaaatgtggtgctggtttatctgcatttgcagcactgaatccagctacctgaacatctaggctctagctagctggagtatttcttgttccaggtttcgtccacggatcgccacatgagagcacatgtgatgttttcggtttcggccctatgaaccgtgctacctccattcaaagtatagcaacttttggtatttaggtcttctttgaattatatgaatccaaaaaagaataagaatacaaaaaaatacatgattgcaatattaatcctacggagaataaaaccatgggaattactcgatacatgtgtaatttcaccattatatgttgcccatctactttcttattttaaccaattataaacacccctctctttagttctcgcatgaaaaaattctgaactatttatattttagcatggagggaacaacaattttaaatgttgttttgatgatattctcactttacaacaaaagttttggcagagtgcggcaattcatgcatttacgtggccacacatgtggcaaattatagtaaagtggggtaacagccaaatacaacgagccccatcggttaccctaacaagctaaagcaaaagctaaaatttaaattttcaaatttagttttgcagttgattttaagatattttcaacatagttttttttcagcattggtttttaagtcgctaataacacatatataaaaattttacctataaattactttttattcccctataagctgttttagtttattagagaatatggacaaccgatgtggacctaggctaacttggttaaaggtgaatgccacaaacgtggttctcatgtctcaagcaaacatcccactcgtaatgcgtgttagagttgacagttcattggagcaaaaataccagggattcatttagcaatagaccctgttagcctgtctggaacatagtatggttcctgttgatatcgaactataaaatcctgtgaaactgatttcatgatcttcatgaaggactctttacaatactattagggtaatgagagccactgatacgtgggcttacttgtatcgtctaagctcccatctcattgactttaaatactcctacaataccgtggaggatccatatccatttaaaccgtagtgtctaaagatgatgagaagaggccggcttagtgttttatttacgagatttactctggtccagcaaaacgaacatcaagataagtacaacgaggtattttttttgaccgaagcaaatctctttatttacggataaataataatatcacggatatttactgtatgcataatatagatcgatttctaggttttttttcccctaaaaaaaggtgccaaacaatggcaaaagaaagacccaaaaatctgaacgatataataatgtctgccaactgaaggtgcagtagagggatgtgatgccacttggccgtgcaggaatattgttagcgttgtgttctgagctgacggctcatgtcatgcagcagcaggaggaggataggatggcatggtcacccatgttttatgtatagtgtactaccagtgtcgtcgaatggagagtacatttgttcacatatatatgggtccaaatacaacggggatgtgattcatcctcagtctgcatcacggtacactgatgagcaccgtcttgtgactattgtctccttgttgttggctacctcccctctttattcttcctggcctctgtagatccattttaagttctagtacttaaatagcggtggtaagtttggtaacggtggtagtaagatacccgctaccattaaaacatagtggtctgttaagaataataggggcaatgtcttatccaaaagtcttcatactaagtgtatttatttaatgctattgaattttcttagcttactttacaaatctagggagaatagctgctttagtcctaaagtttctctgtaggatcagtttagttcctaaccttttaaatggtccaaagaaatccttaacctttgtcataaagcctagaatagttcttggatccaccaaaatcatcatatggatatgccatgtcatcattcatgcaaaatctatgatgaactgtccaatttacccttatatatatcatagaaaaataaatataatggtgaattagacataaccataggaaaaaaatacttcttttttcacccttttgaggtatatttttgctattacatataccatatatttttttaaaaaattttccttttgttttttatttttctatgcgtaagggtaaattggacaaatcatatagattttgcataggaaggtgacatggcatgtccatgtggcgttttggtgagaccaagcactatattagcccacataacaaatttaaaggacttgtttgaacaatatgaaagattaaggactaaaatgacccagaagtgaaactttagggaccatattagatattctcccataaatctactcatcctaattcatatataaaggtagttgtatttgaagatgcaattgatagtgtagtggtaagagttgcgtggttttaaccctcaaggtttcgaaatggcacgagtatgctatcttaatttttttttctaaactttggatgattaaatatgcatggtgtaactcacacacactctctactaataaaatttataataataagctctgccatctcatctgtttcgtttctatccgctggataattgatctatatgcaaattgttgcttcctctgttccgtaataagttaatttttagtttctttcaattatcacaaaaataagttctttttaagtaatcattgtatcagagtttgtgaaagtaaaaaataataattgtattgggagtagataaattgagtaatagttgtagtgggatttgattataagggtatttcttttttttttgttttgtattggtatgtgtaagatgggtgaaaaataattttattttgagacgaaagtaatacttagcattttaagtctagcaaagcaacaaaataaatccacctaatttttacttgcgcaggattccgtgctaccacactctctcacacacacatactgacacacattttacatagacgatataattataaagataatagtgacttataaataagttatatgcttgtgtgtaagatagataaagaaaaatgagagtgttggctctcatataagagttagctctagacatgcttcaaaaatatgcatttaatttatagtgtgagaaagagagaaaagaaaaaaaaatagagctaaccttatactagcaaacctgttatacaggttaggtataccatggatttgtagtaagtggtgagttctactattaaacttttgctgtaaggagaaaggcctaatgggccaaagggcatgagcccggcccagttcttcgcacaattcgcgggaagatagatgagctgccagtgccagttcgagatgcgatgagctggcacgcaggatgtacgagattggcaagggctaatcacgtgattagctgagccaccagatgcgtcattagctgggaatgcagtaattaatccggtgctaatcacgttattaagtggccctctctgtatttttttcttcttgttttaaggtagactcgttcatgcgattcatttgatgcattgagcacgtacggtggtgattaacctgcagattttagctcgatttttattactagcatatttttaaaaactgttaagacatattttacgtgagattattttatataggagttgtttcaaaatatcaaataaattcttttttcaaatttatagtaactaaaactcaattaatcataatcatgtgttattgtctttttctttcgtgccctaactttatattaaggaaaaagtatcaattaccccctgaactattgcggtcatccgaattacctcctgaaccacaaaatcggatatttttcaaccccaactatgtaaaccggacgaattacccccttgacccaatcgacagtggttttggtctacatggcgtacacgtggcagtccagtcagcgtttttttaataaaaaaattgtggggcacgccagtcatactcttcttcctctctctctattatctctctctcgctcttttctctctcacgcagcgcgcacggcgaggacgagcgcggggacgggcggtcggcgtgagcggtcagcgaggtgaggcgagcgtggcggcgcggacgtcggcgcgaaggcagaggcggaggcatcgttgattcgattggcgaggtgaggacggcggcggtgcgcggggggcagagccagttgtgggtggcggagggggcccgaggacgacggcagccggcgaaggaagcggaggccaaccgggcgcacggggacacgcggtgggcggcgggctcctcctccttgtcgtgggcgcacggggacgcgcggtgggcagtgggctcctactcgccggtggcgcgtggggacgcgtggtgcgcggtgggacaccgctgccaccgtaggctccttctcctcatcgtgggggtgctaggacgcatggtgggcagcgggctcctccttggcagtggcgcgcagggacgcgcggtgggacaccgccgccaccgcggctcctcctccgagcggtcgtgccgcgccccatcccacctccctgcgccaggatcggcgacggagactggcggacgcggttccatcgaggacgcaggcatggatggcgaccgggaatcccgctccaccagccccttctactcaccaatcccgctccaccaccccagatccaaaggcgagctcggtgatgaggcatggagctcgggtcggctgccgcgcgcgcgtcggcagcaacggcggtggccacaacagcaacaatgccggcacaccagtgccggcgccggtgccggcgtcgtcgtcgtcagtaagcatggggaagccgagccgacggccgcggcggcgacggatgtggctgcacgagagcgaggcggtggtgatggagttgacggagccggagctggtggacagcatgatcgagatgttgtgcaccaatggcgtccggccgttggaggacctgcaagacctcctcgcctgctacctctcgctcaacgcgccgagcaccaccgcaccatcatcgcgctcttccgccgcgtggccctcgtctagatccacctcggcagccagagccttcttgccgacgcggcgcagcctcttgccgaccgcccgtccccgcgctcatcctcgccgtgcgcgctgcgcgagagagagaggaataagagaattacatgcgggtcctacaattttttaattaaaaaacactgactagactgccacgtgtacgccacgtagaccaaaaccaccgtgtattgggttgagggggtaattcgtccggtttgcatagttgaggatgaagaatgtctggttttgtggtttaggggggtaattcagacgaccacgattgttcgagggggtaattcgtaccttctccaatttatcgtttctacatcactgtagtgttgcgagatagacatgtcagcattgatcattgcttgagtgtctctgcatgtgggtcccactgggccttttgacaatcaccccctgccaccttgtctgacctcatcacgagccgagggtgccggagaaagaagagagcatcggggccgtaatagcacgaatcgcgaggacatctgacggcagataagggttggtttggtttgtggcctaaataggtcttaccaaattttgtcaatgctaaattttggtaagttttggcatgactaattttggtaaggcaaagttatgtttagattgaagccaaaatagcctaaattcactattgaaaatggtctatttttttagacatgtcaaaatttggcttcaaaccaaatagatactgaacactattgaaattgtcaaatattggtaagcctaatttaggcctcaaaccaaaccagccctaaaacagcacgctcgattgatcgatcatttgcgagattaattgcatgcatgcaggctactgaagtttgaagttatgaaacttgctgaaatgttttaaatactgcgaacttaatttttattatcttgaaaactgcaagttcatatatatacatcatgaaacacggcatggtcaaaatatgtcctttatttttccccctacaaaatacatcctttatttgcggcagattcgatggaccagttaagtaaaaactagctggaatctgaccaaattgtaaattaaagtagttttttgactttgtagcagtattctccttgtgtgaaactaccgcatgaaacgagattatcttaattataagttgcacgtacgggtgtatattactactgctcaatgagtagattaagtaataagtacacgtccaaagtgtacgttaatgcagaaggtgataatgcatgtagcaactaataaaatataataatcgtattcaacgagagcaatgtatatatcgttgaatcatgtggttctttctagaaactactaggattcactaatggtacgaaattattaaaaaaatatggggatttttttatacagtatatacataattatggaatgatcagatatctgccattgtcatgataaactcaattttttagatgcaagttgcttagaatcacactcaaaataattcacagcgatggatatatctatacttgttaatgtgtgcaccatctaccagaggaatttttttgttttgaaaccgccagaggaaaatatactcactccgtcccaaaataaatcaactcctagagtttaaaatttgtcccaaaataaatcaacttctaccgtcttacctaccaccaatccgtaaatcgagaaattttattatttcaatacttctcacctacatattaatcaatacaacttttacatttattaaggatattatagttttttttgtctctttccttaattattttttgatatgctagggtttgtttttttacagaggaagtactcccttcatcccataaaaaaccaacctattatcggatgtgacacatcctaatactacgaatctgaacatacatttgtctagatttatagtattagaacatgtcgcatccgataatagattcgtttttatgggatggagggagtatgtgctaacaataatatttatttttgtttgtgctcgtgtgtttaatgcttaacttgtacgtttatgtgtcatgatcgatgaactcaacattttttgatgcaagttgcttatgtttctagaggcatcctattgtatattgtttaatttcgttgcaataaatttaccgatcgacgatttatttttgttatattttcctgcagccacatagtgggcttaatttaattccaggatagataaagtatataattatatactccctccgttttttaatagatgacgccgttgactttttctcacatgtttgaccatttgtcttattcaaaaaatttatgtaattataatttattttgttatgagttgttttatcactcatggtactttaagtgtgatttatatcatatacatttgcataaaatttttgaataagataaatagtcaaacatgtgagaaaaagtcaacggcgtcatctattaaaaaacggaggtagtacgtagtagctagcgggtcattggaagttgaccatttcctgggccctacacatatatagagagagaaaataaattaatttcttttgagtatttatttttcattctgccttgcatggagttagtaatggttcttgatgttgcttttctttgtttaccaagcaatgctagccacaactttttagttgcaacttggccctttttgtgatacacacatgattcgttaggtcatgatctgctgctgcaaaacattaataagaataattaatatatacatatgagtggataacaacaaaacaaacataataatatgaatacaattcgatccctattatttttacgggctgtttttcgtcacacgatgtggtattaagatttacaaaccaagctaaatagataattcataatttatcactgttccgcgctgttttaaggtaatacttcatcatattgtcgttgcatattatttacttcacgtctcttagagataggttttcttaaatattttctaccattgtttagtccacttattgcaaactatttgttaagtttattttaatttgtctgtataattaagtagataatcaatgataaataattcaggtgaaaatctgttttccgcatggaggtacaatataactagcatgcactatcgcactgctaactaaagtgatcaaaatggagaaaaaactggaataaatactgtggatctggttgtttagatattaatgctatcatgctctgctcagactaaattgattcctgaaaatacgttaaagtgacataaaacataattacgtggcatggacagaacctaatgaataaaacatgacctatggtttttatttaaaacatttttctaatgaagttataaaatataatagctaccatagccaaaatgtcagaaacaccaacaattttcttgtgtggtagttcttctggcttgtttatttatggtcaacagattcgtaagtaaaaaatcaaatacaactatatatatgagagggtttacttacttccgtctcaaaatatatagttgttctctagaattcaaaatttatttcaaaatatttatcacttaaacttctaaagtactacttgtcccatccatcacatttcattcaaatatcttcctattctaccctcaattaattaccactcaactctcaaccatacatcatttaatgaggggtattatagtctttttcataaatcttaatctatgcttaactacctaaaagagatatatagatgataaaagtttgttttctaaaaaaataagatcaagggtttatacatagtataacacagaatgtacactaaaatgtgtctacgaatctatgattgtgcctttctattttccgtcttaactcttcgaccgctaagaagtgtaagctagagtttagatacaaggactaaactttattccctgttacatcggatatttggacattaatttggagtattaaacataggctacttacaaaactaattgcataaatgagagcgaattcacgagacaaactttgtaagcctaattaattcataattagcacatgtttactgtagcatcacataggctagctaatcatggattaattaggctaaatagattcgtcttgcgaattagtacaaggttatggaatgggttttgtcactaatctacgtttaatatttatatttagtgtcccaacatccgatgtgagatgaacaaaaaaaaagtccctaatccaaacaggctctaagtcgctctaaaattatttttgttgctttgccatttttttctcagcttataaaccataagtgcaaccaatgcagattaagggataagattttcaatgcgatgattgatgatatcgatcgtgaggtccgctaacttgaatctagaaaatgagggtaaagttatcaaatgaagcacatgaaaggctcattgcattaatatatccaagaagaaaaaacaatccttttagcaatgaacaccaacttgcactgtttgctcttccttcagtcctttgtgatcgatctttttccaactgaaaattagttgagcctagaaaaagcataacagaaaagggattcctcaaaagtatgagtaaacactaccaaatcttatagatccacaaaacaaactaaagagaagtaccaataaccatgatgacattgcaagataacgatgtaattaatactagtgtgtgtgtgtctatatatatatatatatatatatatatatatatatatatatatatatatatatatatatatatatatatatatatatagaaacacacacacaaatttaaaactaacaccaaacttgcattgcatcctcttttgatgtcatcaccccatcagaattgcaatataagtaaataatttcaaacttataatttataaacacctcatctctttactcaacttttaggtagagaaaaaaaaaggaagcaaaaaagaaaaaaaaagaagaagcaacactatgcagaatgcacgcatgcatgtggatatactacaccatgatcaatcactaatggtggttgccggcggccggcggcgaggaggaggtggcgacggcggcgagcttctggaggttgagcttgacgacggtgtcggtgaacatgcgcgtgtcctcctcggtgttcccctcggggacgtcgacgacgtaggactcgacgacgacgcagtacggccgcggcggcgaggagggggaggagaactcggtgacggaggtgacggagcggtagttgcggaggcggtggtcgccgccgacgacgcggaagctgaggacgtggcggtcgtcgtcgaggatctcgaggcgctcggtgctggtggacgccgggaggcccgacacgacggcgacctcccggacgctccccacggtggcgccgtccccggcggcgagctcgcacgacttgatgaagtgcttgtaccgctgcgggttggcgaacccgcgcacgatgggccacacggcggcgagcggcgcgtccacccgctgcgccaccagcgacgtgcacgtcggccgccgccccggccccgccgcgcgctccgccgccgggaacgtgtggtgcgcgcgcaccacgccctccagctcccgccgctccgcctccgacgccaccgcctcccgcagcgccctctccatgtggggctccatgcgcgcgcgatcacgatcagcttctcctcgtcgtcgtcgtcgtcctcggcggcggcggaggaggaggaggaggtgattgactgctacagtttaaattagttgagttttaatgagagatgaggcgactcgcgccttttatggttgggttcttgggttggctggtgccggcggcttgatggttttttttttctcttctggttgtttaaaattttaatttagcggagtaatatatttatttgtgagaaagatgataaaaggtcaagtgagattatgttgattttttagtttaatttcatttattgatacacaccactacgcacatttacaccgcactcacaccccctacgaatatgtctcctcacacatgtttaaaatcaagacggaaactagcgacacaccttgatctcaatttcttgattttaatttaagataccttaaaaagttaaagatattagaatgtttttttaacacatgattaatttgccacggatggtttaagctaaagtattggttataaatgtggcaaaatatggttagggaacaattgtaaggtatgtttggaccacactcactgcaaaccaacaatttaggaacaactttttttggtacatttaaattttgatattggatacttagccgtgaacacatgaccctaaatagtccaaaatcacaaaaaagaaagatttggaggtgtttttttggtttgtgatggagatgcatgcaatgcacgggttggaacttgggaagaaggggaggaaagtcaacacatttcacggagtccaacgaatcatttcacgtatatatacatacatgtgacaggtagaggagaccttttaacactggaatgatcttctaaggatgatgcaagatcgttgaccgcgtgattgtttattgattcgatctttactccatttgtttaaataaaataaatacttctaccatagttaatcttgaccaagcaggagtatgcaccactgaagtactgcctctattaaaaaaaatcatttcctatcaatacacactacatacgcacactatactcgcatgcccaccgatacgtaacgcacgtttaaagggacaaaaaccatgggtaaattcatgatcgcaatatttaataatcatataactataatttaaaacctgacgagtaaaatcacgtagccactagctgatacaccacttattttttttacgaacgcgtaaaataattacacgtcaatatattagaagaaaataagtttatgttatacaacgcaatcaaccagactgacttatgccaagggaagagaaaaaaaaagcaaaaaaagtaaactaaagcttaggaagtactaagggcagagccacgctatactcctaataactacaccacttgtgactttcatcatataagcatcaaatgagatttgttatgtgttgtatgcgtcaattagttgcgtagtgcgcagcacaccgagcttaagtacatttgttgttgccattggcactgcgaattataaaagcgcgactgataaaacaggagattaattaagctaattaagcagaagatgaacagcatgtgacgacgtatgagtgagcgtgaatggtgataatgaccaagcaaaagcagctgttggctgaccgctgatcaaactactcatatccttctgagttcttaactatccaggctcctttttggcgcggtcgtggttcttaactactactctagtccagactatggttcaccataccgctggtaaccgcgcggttaccgcggttatcgggcttaccgcggggtacggtaatgtaaataccgtggtaacctccttaaatttaaataaatttaaaaaataatttaaaattttgatgaattttgcacggttttgtatggtttttcactgttaccgcggttaccgcgcggtaaccgtgcttaccgccagggcgcagtaaccccggccccggcggtttgggcttggatgcagacatcggtttgcagcccaaaataaatgataattatacaactttttaataataaaattaattgttaaaagtgtgtttaaaattaattgaagtactaaaggaaggagatatttgtttttgatatatagcccgtggcctgaatgggcctagtactgcggaggaggtattggcgacgagaaaatcaatgttgtgccaaaaggattatgctacaagagagatactcggctcagtccacatgtaagatgtaactatgctactgctgcttggacgagcagcaatgttgtgagacggcggacactattaagaaaactatgtgaaaccccgtgttttactgcgggaatttattatgataacaataaaaaaataacgtgtaaaatagctagataatatcagattaagtaaattaatatggtttatgaaaaatttaaatttgaatagtatgtaaaatggtgattcaaacgtaaaaagtaaggtagtatgattttatggaagaaaaaaagtagggagatagtttggaccgtagattaatcatctaaagactaaaaacaattgatgtgatatgacttcattagaggaaaaaaggagaaagataatttaaactatagattaatcatttaagcactaactaagtgaggatgaactatataaatatataggatatcataaaacataataaagatatacattgaaacattatatgaattatcttggatgataatttaacatgtttgtatttgaaaagctctcttaaattataaaaattataaagatacaacatgtttacataatgtttaaatgtgatgattgttagtggaggatgatgtgacatcttgttagtggatgatgatgtagcatctttatatgttatgttaagcttaagtagttagtggaagataatttttttatagtaaaataggattggaattttagtgcgatgagtgtagctgtgagtgtagctgtgtaggccacgccacacatacgaggaacttaattcatgtgccaaataggcccagagaaccgtttgtttgttctaaaataaaaccgtttgcgaacggctctcacagtgccagtggcatttcaaatggttcagtcttgggcagtgagctagatccacagacaaaattgtatccgcagtgcccaactgaggggggttgattcaggggagtaaagttttgacgtgtcacatcagatattatacaaggtgtcgtatagggtgttcaagtactaatagaaaaaactaattaaaatatccgtcactaaaccgcgagacgaatttattaagcctaattaatctatcattagcacatatttactgtagcaccacattgttaaatcatggagcaattagttttaaaagattcgtattgcaaagtagtcacaacctgtgtaattagttatttttaagcctatagtatttaatattttatataggtgttccaacgttcgatataacagggcgtaaatttttgggtgggatctaaaccggcccttaattacccccccccccccccacccccaatctattcctcactcgcttgcgcttcacctcgcggcatcgacttcctagaaaccctcgttgcatcacctccacatttcactcgtttgcaacgttatcgtacgcccgagctctcggaagattgctgaggcatgaagctccatagtggtcctctggaagggtgttaggctcagttagtttctttgagttaacaactcactctcttcattttccattctcgtgcttttcaaactactaaacgtgtgttttttttaaaaaaatttatacatgaaagttgcttttaaaaatcatattgattcactttccaaattttttgctaatacttaattaatcacgtgttaatagactacttcgttttctgttttatttctaaatattttgataaataaaataaaaaatgaattcaaacaaagaaaaacaacagttgtcttaaagaaaaaaactgagggcccatacaacacatggatgggttagattcggcccactcaacaacaatccagtaatttgctacaggcccacgaacggcccttttaggagcctcacttggccgaaatacaagggccccacctgtcagtgaagcccgtaataagcacggcggcggcgcccactccgccggcgtctcccccctcgccgacgaaaaaaaaataatgccccgccgcctcgcgaccacctactccggccgcatcgccgccgcgcggccatccccggcgggcccctccctcaccgtcaccgtcgccccgacccctcccccgacgccgctcgacccgcgcggctacccgctcccgcgccgccacctcgtctgcgccgccgcgcgcatcctccgctcccacgcctccccgtccccgctcctagacctcgccgactacctccgcgggctccgcctcaccctcaccgccgccgaggcctccgaggtcgtcaaggcgctctatggggacccgcccctcgcgctcgccttcttccgcttcgccgccgcctcgctcccgggcttccgccacgacgccttctcctacaaccgcatcctggcactcctcttccgcaccagggccggcccgtccgaggcgctgcgcctcgtcgccgacatggagcgggacggcgtcgccggcaacatctccacgatcaacctgctggttgggatgggcggcggcggcgtggagatggagaggtgccttgagctggccagcaagtgggggctcaggctcagtgggtacacctacaagtgcatcgtgcaggcgcatctgaggagcagggaggtgtccaaggggttccaggtgtatgaggaaatgcggaggaagggctacaagctggatatctttgcgtataacatgcttctcgacgcgcttgccaaggctggaatggtacgataatcggctaacttttgcatatgtttaaattggtggtgtttgtggaatgaatgctaatctaggaatgtctctgtggaatcattgtttcatgctgtcgatatgtttctctctgattgtttgacctagaattggagtcatatttgcaaacattaggtatgaagatgacatcatacctaatgttatgtgacctaagatgacatcaataccaagatcaaactgaaattgcaacaatataatgcccttgcttataaactgaaattgccctctatgatggattgatggtagcccgttcatttttttttaagaaaaaaactcccattgccaatggttttggcatactagcatatattgctagtaatgtagtctaagttaagatagctatttgctaagttttgagcatcagttcctcacgtactaaaagatcaagcatggttggtttgcatagttgacaaaacagtattttcgtttgccattgggatgatgcaaaatggacactcctatgccatcgctgtagcctgaggcagtgagagaggagacaagggtggtgaacagtggcaaaccggggggagggaatggaagaggaagaggcagagtaccttgttagggtggcatagaggaatatcatgtcaaggttgattttaaaagtaatactggaaattggttgtgttgtacaaaaatagtagactctgatatctcttttgtgtaatattgttccaattacatagaagattatgtttgataaccgagaatgggttttccacatgtacatgctggtaaatgtactatcaccacatcaaaattgatgcaaactttcaaaaatgcaaagtaaccaactcgtctttaattcattgaggtgtccttgccaaatattgaagctttttttggatgtttagtatagtacatgtagccatgtgtgaatacatgtggagaagcatttctcttgataacttgcacattgtgaaatatgaatcgagtggtagtggagcacagacagaaaattgtttggttgtctgattctaaccattgccgttcaacaagaatcttgcctcttgtatctcatcctgttctatattttttttatatttgacataccatgcatcttgaaagtgcatatcgttcagtgcttattcctcaaaacttggcagctgacctttgttagttgattaggttgaccaagctttccaagtctttgaagatatgaaacaaaaacactgtgtaccggatgcatacacatatactatacttatcagaatgtctggaaaggctgggaggacctcaaaatttctctcattttttgatgaaatggtatcaaaaggatgtgttcttaacctgattgcgtttaatactattattgaggctcttggcaagaacaaaatggtggacaaggtaatttttgtactctccaaaatggtcgagaatgactgccaacccaatcaattcacatacagcattacactggatatcttggcaacagaagggcagctgcacagactgaatgaggttctagatatctgtagtagatttatgaacagatcaatatattcgtatttggtgaagtcactctgcaaatctggtcatgcaagtgaggcacataatgtattctgtcgcatgtggaactcccatgagaaaggggacagggatgcttttgtatcaatgcttgaggtgttatgtaatgcagagaaaacattagaggcgatcgacctgctacatatgatgcctgaaaaagggattgttacagatgttggcatgtacaatatggtcttttcagctcttggaaagctcaagcaggtctctttcattagcaatctctttgacaagatgaaaacaaatggaattattcctgatgtttttacctacaatattatgatttcaagttatggtagagttggcttagttgataaagcgtctgaactttttgaagtgatggaggctagcagttgtaagcctgatgttgtcacatacaattctttgataaactgtctaggaaaacatggtgatcttgatgaagcccatatgcttttcaaagagatgcaagagaaaggatatgatcctgatgtgtttacttatagcatattaatcgagtgctttggaaaatccaataaggttgagatggcatgcagcttattcgatgagatgatatcagagggatgcacccctaatattgtaacttacaacattttacttgattgtctggagagacgtggaaagacagaagaagctcataaactttatgaaactatgaagcaacaagggttaatccccgactcaataacttactcaatacttgagcgactggaaagtagatctcaacgaacagtaagaatacgtaagccaactcggatttcaggttgggttgtcagcccattgagatgaggatggcttggtaaatttccagggagctccctagttcttcaggtccataccttctgtgatgtgtatctggggactgtgcataatttccagattggcatcaaaccatcaactgaaaattttggttcactttctcctccagaatgatagctaaggatcactggatcaggcatactgcgcagctacctacaccctgattctaagcatttaatgtgccatcgactttcaaaatgttaaagtgtcctcatttcaagttcaaagggcatgcagattcatgtagttacaatgctttggaaatggcagatgtaatgaatgcatccttcgtatcttttaaggttcatcatattacaagagaaaattctggtgtgatattgaagacatttccaaaagtggtaagagttctgctttgaagtcatataagcttctacaacatgcaaacaagctatcttttaaatattggagatcatatttacagtaaccagatgatttggttatgaactagtattcattattattttttcactatctctaagtgctgattatgcagccaatttgtttttaagatgtaaaccctgctgctttcttccctatattctgaggatgattatagtatggagaacattatagccaactgtttctgtagtatttgatgtacatatcacagataatacgaaacttgacctacaaggttactacttgattacggattacctgtagaagttgcatgttgtttccgcttattgggatgtatttgtgaaatttgaaatatttaaggtgacatggagacatcaattgtttttcttcgagttataactaatcaacagatatttgatgagtacattttgtacaaaagctgcctttcccgtcagataattattaggctgattggattgccctgtgatggtgtttttacgggatattccacgagaatatacctatgcttcccacctcaatatacagtggaaaggccatatgtaattctgaaataatttagtaacactgtcacaatatcaatatactatgctacaatattttaggatcatttgggaaggcccagaatcctgactcgccatgttagatggaccaggattttttggcttcccaattaggccaggaaagtggtatttagatgtatggcactctagactgtccggtttctagattttccacttaaaagtttttcctttgaaatgttcgactaaaaaaaaaaacactatttgagatatgcctaattgaaaaaggagtaggaccatacgttcctttcttcttttttcttctctttcccacctttctccctttttttcattgttcaattccccgcaaaaaaaaaaaaatccctttgcatagatgatttactatagaaattagctggttacataaaacaaagtaaccaagttgtagccctaatggagccacacaatttcaagcaaagaatgttagggtgcgttcgtttctcccctttcccaacctctactccctcgttttccacttgcacgcttcccgaactgctaaatggtatgtttttttgcataacttttctatgggaaagttgcttgaaaaaaaaatcatattaatcgatattcaaattcttttagctaatacttaattagtcatgcactaataacttgctccattttatgtgtgcgtgagagaagatcccaacccctactatcgaacacatccttaatctgtgtcaaatagtcaagtagatacgtacaactgtacatttagctattaattgccctgaatgtgtttttcttataaggtctgttgacgttaaagggctgaaacaacatggatctattgtttcttttagttactgtttggatcatgggaattttaaatggaacatttcacctactggaatcaggaaataattcccgtgtcccaaatgtggccacagagaggatcctcttttgcaattttttatttgttgttgctttgttctgatcaaatgtttacggttacccaaacattgtattgtagtagtatatagaacattccatgtttcaattttcattgatagtgatgctgctgtctgggaccctgggggcctgttactgagtaattactgtctactgtaatcaaccaaacattataaaatatgttgtaacgttcctatgtagcttttgtattatttatgtccacaaatgtttggtcctgctacattgttttctattaattttttcatttagtttctattgtgtaatgcttctattgctggctatgaaagctgtttttggagtttgtagcaagcctggttactggttgtagcatttatttaaaccccctttatttctttctgcagtatgtacaatagctgtataaattattcttaaaaagtaagaattcctttggcactcagtggtaatttgttttaataccattgtgtttcctattgtatgacctcaagttactatattaataaaacagaacaaatgtaacactttcactgtccagtatcttttccattagtccaacatttgcagtagtccatattcttgtgcctgctgtcaccactcaggtagcaatcaagaggaatgaaaccagattccttcccaactagtttcagcttgaaaagaaatagtattccaaacaattgtaaatatcttatttcattgtattctcaatccttgcaatttgccacaagaattttctgtttcaataggataagatatggatgaccttttgtgtgggtaggatttgcttctgtcaacctttctggacaacattagaatatgctttcaaattgtcaggtaatctgccaactggtgaagatttctttttattttaaaagagcttctgttgctgaaaatgttactgttacctggacatcagtagtttccatacagacaagcctttggtttgatatgtagtttgtcacactatgaagctcaattctctatgtttaatcaggccactgtaaattttgccatactgtgtcttcccatggtagtattgtttccatttgtcagatgtaatggttgctcaatgtaacttagtgagtagtgatggtcggagtgtcttagtaagttgcaccaataggccagttgcttgtaagtgaggctcgctcctcacttatgtcgtctggagtcaagttggacattggaaatgaatgatagccatgcataccgaatcttgcaattttagagttgtagcactctgttggattagtggcgtagcttcaatttaggttgccgggtgttgcaaaatatgtggctaaatgttagcatctgttcagtgaaaattgtactgagaagacacaactgctagcacaagtattataatcacaactagtaacttggtgaaggaaacagctgattaatcttaagttcagatacttcattttgcatcatgatccatgtcctgttcttggttgaacttgtgtgctgcttgcaatagcattgcattatatcgttctatacaaacatgtttctatggacaaatctgatgttaagttgtttttcccttccatcaattctagattttcatgatcgttaccaatttactgatgctatattattcagggagacagacgttttgaaaaatatatatatatttctaactattctttattgctttgcggtcgaaacaaagttcaaaagaacataaaatcctatcttttctaccataatatttgatatagtgctctttaaaaaaaaaaaagaagcagcatagcaaaagaatggtggctgcagttgcctgattctggatggctcagtggctacgtaagaatattgtgttggggaatatgcatattaaaagggaatgcctaacacattctcaatattctgtactgagtatatgttgtaaaagtgaatacattcaggaatagagtgatgcaatgacaacttcaatcttttacaacatactcagtacagaatattgttctttactcactgtattttgttaaaagttcatcaacggtaccttctggccatcatttttctactgcatttattgatggtttgggacctgccattatatttgtttgtaaggcccaatgttccagacatggatcaaatagtgaatcagttggtcttggactctttaccacattgtcaaaattgtaggaacagcaagaaaggttatcgccacacaacttcaaatactctttaatcaaaactatgtttagtttttctcaatccaaggaattgaactatatgatggaactcgatttttgttaatatttatttgagctgagcatgtctccttattttgtggagacaaggacaaataaccactactactaagcaaagaaaggacaatcttaagagtgtaatctgcagatttgggaagttaataagctatatttttccagtacaaattaaaatttgatacttgctaaggtcgtttttaatgtcaaatgaaatttaagttaaatgtaatataagtttttataatgtgtgtgtttaaagaattttacagttatttgacaagtagaccatgaaattgccaatggtgacagttgatagaacatgcttccggagacttccacccaattattttgaattatgtgaggtttacttgcaatatagtcgtgtattccattggagttctgatctcaattctctgtgatcccaataggtccttaacaatatgcaaagttgggaatcattccgttgtggaggctaatatggcatgtactcccacttaaaaaggttattttctggtccaaattggagtgagattttagatggcttctccttgaaataacagcaggggacaccacttggacatgtgtaggtggtgtatattattatgtgatttgtatatttcccagatctatttaagacgcataggtctcttaggattgccacaacttcaagttcagcgagtgaaaaccaatggcatttgttttgccctcatcatattcaaagagctatctttctttgcctcatccgaggatttcaagtacaaaacaagttagttttggcatagcagcaggtgatgacgtgtgaaatctttattcaactttctaataaagaaaaaatgttagtgtgcattactgcatctgcttctagagaaacaagaagctgcaatcagtttcttatgtttttcatgttgatttgtgctatttaagtattattagtctgatatttttttactttgtttgttggtttgtttggaatagcaaacctgagggtctggcaatttgattgatctcctaactcattgttcagtgtgatagtttttctcagctttgcaatgtatttcgccaaactaccttactatattatgcataattttttctcagattctggtagctgtatcttacagtgttatattttgcaggttcagtgttcagacagccttgcttgaaattgtcaatattcagtggtggcaagaccttaagcaagggaactaatgcagctatttcagatacaccattgcttggaactattgatgtgctggatgcctttgaggatgattatggtggcattgttgttaaccctacttccttaccaaatacatccaatgcattttcttcatcactccagtcctcactttgttattggaataagcaggtaatacacatacatattgctagaaagtagatggatataaaagggggttgattaattcattactgcaggggaaaaggggggtttggttgaagatacaggaagatcaagctgatctagttccaattgcaataaaggcaagttaatcttattattataagtttttttatcttatcgaccttagtttagcatcagacttatctgaaagagcataatattcttttcactgaaggctggctaatgtatgccactattgctggaaaggaaaaaaaaaaccgtctatgccaattttcttttcatgtctcttacattcttttgtttgataacaatacctcattacctcttaactaatcagttaaaaattgcagttaaccttaactttatttgttttacatttttttagatgggcaaccttaactttatttgttttacaatttttttaggcgggctttgtttatcatcatgcagagccagggtacgtgatgctaactttctggcttccagatggacctcccggtttgccttccacttcattgcatcaaattggtgttggagcatttgtcatgaatgacaaaaacgaggttttgataatttctggattatgcctatttgccttgtcatatactttctgaacgaaagaaaaaagcaaccatttatctgcgtatgtattgtgtttgtaatgtatgcctttgattttaggtgcttgttgtcaaagaaggaaaatgtccatcgcactgttcagacatctggaagatccctacgggctttatagataaggtacaaaacacagagcggagactccctagtaaaacaaattattgatctatgataagtcaaaagccaattttttttctctgtgtaaaaaccaatagccaagtcatgtcaaacttattcaagaaaaggtctatgttttgtttaagctgtttatgttggctttactaatcttatattatttctttttctgctatcagtttgaagatttgttttctggagccataagagaagttcgagaagaaactggggtaattacactgttttgacttgttttactgaactatgctacttaagatgaaatgttattttgatgttttacaagaactccacttttcagatcgaaagttgtttcctggatgtcgttgctttcaggtaattgtcaagtacaatcaatggagttattcgaaccttttactgctgagagttccttcatgttttttttttcttcttcacgtttctgcctctgttcatacagacatgcgcatcaagtccttttcgataaatcggatatactcttcatatgcacactcaagccactctcatctgacatatctatcgacgagtccgagattgaagcagcaagggtactccctaaccataattcagatactttgtagtttgtactactagtttagatgattgagctctcactaatgattttttgggttatgcccgctataatcattttcagtggatgccggtcgaagaatttgtcagccagccattccatcaggaggatgaaatgtccagggccatcactgacatctgcatttcggcacatcacaagtgctacgcaggactcgccgcgcatcaggtgatgtcaatgctcgacaacagggtggcttatctctacactggggatactagggaagcaactgggatgtgtccctgagattataaatcgtaataatcttggttaattggtgagcagcaaagtctgtagtattgttgctatcattgtagtacacaggtcagttcagttatctgtgtcctatatgcaaagattaacaattggtcctctatccattagcaaaacatgtcaccatgtatcagtctataacctggcaataacagtgatggttgttctgaccaattaatactatattgtacatttgtactaagtaataaagcttgagattacattattatacggagctcagagtatatgggttttatttgaacaggcaggtctatgtctcatgcactcatgccatcatgagaagtactcctatggtgtacactgtgctacaaacaaaaattaaactttgaaatgaatgaaatgttgctttgtattcgtgtaccgttaatacacaacataaatttcctgtatgatatgtttgaaacttcaaatctagtaaaacaaaaatactttgaaataaaatcaatcatgcactgtctagtgtccacgctgttccttcaaccaactgtgtcgcaaaccgttagttaaaccggcccatttaggagggccaatggaggcccggccctaaacccttttcttatctccctcctccctcctgccgccaccgtcttcctcctccggctaaaaaccttctagaatcttctagacccctcgcgctcctccatggcgcgcctccaccacctcctcctctcccgcgcgctcgcctcccaccccctccaccaccacctcctcccgtctccgccgccctcctccagcctcctcccaccgctgctcccctcgccaccgcgtcctccttctcctccttctccgcttcccggtggtcgcggcgtgccccactcctcgctcgccgcggcctcgcggcactacgcgtcgtcgacacctggacgccggaggcgagcgccgccgatgctgctgaggcggaggagggcgaggcggccgccgcgggagggccccgccgagctcaacgtgcagattggcatcgaggaagccctccccgacgaccccactatcctggtaatagtagcttctgcgtgcgtttctctcaccatttccatataaaattatctatcgcatttgacgatttgaagctaatttgctctgtttattatatacggttcttgcactgaaaaatgttgaaattgtttgtccctcttatgacctgagttgctatgcagagcattgcagaagcgcttcaaatggatgttgctaaggcagcgaaggtggcctttgaccacctcgaaaactcggagtacaaaaccagagacaattgtataagcgatgtgaataagtacgatactgttgaggtctctatactgctttgtgatgacgatttcattcggaaactgaataaggaatggagggacgaggatcacgctacggatgttctatcaatgtcgcagcatatccccgggctggacattcccattgtatgtgtaccattgagtcgatgaataccatgactaacatattgtttgattaccatttttttctgatatgtttgtgtttgtttgacagctgcagttgggtgacatagtaatctctattgacactgcacaacggcaagcggaagaaaggggccatacactgcatgatgagataagaattctcatggtttgtttcgctcatttctagcatcactttttattattattattttggtctaatgtggtgatccggtgcattttcatcatcttattttatttcctaattcccaatttcggagtagattgtaatcctattcaatgctaacgaactccaacaggtgcacggattattgcatttattgggctttgatcatgagctcagcaaagtggctgaagaagagatggagagcggggaagaacatatcttaaattctctagattggaaagggaaaggacttattaagagtgcatatgattccattcatgacatggatcattcacaaagttatgttggtaggtatcttcacacattttagcatgctttttctttatgttgtcagtcaatttcttctaattggagttcccactgatttccccattgcatgcagaggccagtagagattcagatgaaattaacctacgggaagttcatcaaccaaaactgagccatatcgtatgtgatatagatggtgagttgatggagcatatagaagtatgctgtttgtgttggacctttcctagttctagcaggtaacttcttctatataaatgttaaggcattgtggataatgaaggatacccgcatgaagaatcaatagaatctttgagagaggcagtttcaaggggaataaacgttatcacggtgactggaaaggtgggtttcatgtattcgtgcatgcaaagtgaatgtggcacctatctgaagtgaatgctaaactgtagactgctttcttcaacatattatcaatgctatttctagctttcttatagaagaacagagtattagaaatttggaatattaaagttccctgatgaaaggggagttaccgcaggaggatgtttagtgcttaaaggaatcaattttcttatttgcaagccagctgagtatatcagtattcactgtaataatgttctcttgatttatttcccttagacccgggcttccacaataagaactttcaggcttcttgatttgggagggaaatatcgttttatatcagagagttcacctggtgtatttctacaggtacatactctccagtttcacctgaataatttgagaaaagttgttttggttatcagagctttgtggccatgttatcttaccttatctgttcccctgcgatataatggtgattggtgaagatgttttccatcacaacctgttctttaataaaacatttattagaatcaggaatcgggattcgggaccattcagtttaggcttcagtttattgtatgttactctatggttaaacatcccagtggtctaatgtgtggatatgccagtatgtgcagtttggtgtacctcttgcttttgagcacacgctttttatataacatgcaatggttctatatagaactggtcttctagagaggacatagcattaaagataggatgccatatattgttgctttattcgttcatctttaaattcttgaattaaattgaactgctcaaggttttgccaatccatgtgagctgtctcagttatgtaaaaaggtactccatagttcatttgttacatatggaagtaggattttattaagattttttctgcaagcctatatgagagcataatatacaaggaagtgaatgttgagatctcatcattcttttcatatttgatctagtcatatcatattatttattatgtttgctatgacattttacccttacagatttcttaaaaaatgcgctgtttcctgtagggttcacttgtttatggaaggcacggccaagagatttacagagcaaacttaggtttggatatctgcaaggaggtacaatcatgatgccaactaattgtttcttgttttctactatcaggtgtgcttttgtggcagtataattacttatatgttacatcagatctgcactttatcattgaaatgttaatattttacgtactatttctttatcaggataattttctgggcatcttattgagactgattgagtttgttgaaacttttctcttctctatcattgattttggattttttggatttatgaaatgtgttcgctttggtaatgtgtctcttttttgcatgttaacatttgttagatgtcatgttgatgtgtcttttcctccatttgcaggcatttttgtactccttgaagtatagtatacctcttgttgcataccatgaggaacaatgtttgaccctctttgaacatcctttggttgatttgttgcacacaatccactatgagaccaaggtctgatctaaagatatttgctacgcaaacttatcttttcttcctttttaacaatggtcggcagctgagtaaatgttaaattctcttcataggtaaaagtggtgccttcagttgaggacctcttggggtattcatcttttcaggtttgtctatccgtaactttggcatgcaaaagtttacatatcatatctgttaaggatagtatgcctttctaccttactgtgaaatgcattagtatatattagttgaacaatttttgaagtaacactgcgatgtggtaaaagagcagctgttgctgggaacttgtgatatagcatgaggacccttccaaaatagacagaattgtagttgaattatccacattatcgtcacgactcgagtccatgactggataaccactgccggaactagcaatagcggtagagctgctattttctgaaagcctttctctattagcattctggaatacagacaaaaatcttccattctaatcactgcagccactcaaccagtagtgttaaatgtagtaattcctgatgtatgctcccttcttggctgtccaacataaaaataaatccataaaaagttaagctaacccataggagggcttacacaaatctcttgaagatggggtttctagaatatggctagaaaactactccctccgtttcacaatataagtcattctagtattttccacattcatattgatgctaatgaatttagataaatatatgtctagattcattaacatcaatattaatgtgggaaatactagaatgacttacattgtgaaacggaggaagtactatttaacaatcctcggtgaatcttcagtaagtcaaccagatagatatttagaccagttttatttggattggagttacacaatttatttgcacgtgcagaagttgcttttccttgacaaagtggatggggattcatctgtactgagacagcattggtcagaactaacacaaggaagagcacgtgttatcaaagcgcattcaagtatgattgagattgttccacttaatgcttcaaagggtggtggtataaggattttacttgatcatcttggaataactgaagatgtatgtatctgtttccatcaaagaaagcatttacctttttcattttgtgcgtaattttgctctctagattgtgctctcttagaagggaacatcgccgctaacaatatttttttttcttttacaaaattgtttctcctatgcagtctgatcttgatgctgtgggagactacacaagatggctaagcaacatatttacttaaccattcttaagcaaaagcttggtgataagcttgagataagaagaaatgacatgcatatgtgatgcacaaaaaggaaaacaaacaaggattccacattggacatgtctattttgaagcatgtaagaaaacaaacttcataccaccgtccttttgggctggaagagaaattactgtacccttaaacttttgaaagggatatgggtgtggatggaaagtttgctacttccttcaggtaatgtatttttttaaatttagattacgttactctatttacattggattgtgtgagaaccatttgtccttttgtttaaatttaaatagcatgaaactcatccttttgttgttcacacttcacagatctcatttatggaggtgtgttggaaataaaatcagaccagcccatctgtgatgtcaagaaaacaaacatcaagaaagtgcaatttgcaactagtgaaaattttatgtgagactattagtgttcctttgctctgagcaaacgtgtcaaattcatgccaattttgtttttctgtagaatacctgtatagctgcgctgcacaaagcattgctagttgttgctcgatcatgtaatgcaagagtactctagttcccagctgataggattttgcttattagctagctgtatttcattccacccgtttttagtagttgaatttcaaatggatggacttaaggaaatgtaagaagccaggttgatcccagaagaaaaaaaatagttgagtttccttgtgaaaaggagcagtacaagcgcagcacaacatgttagctgaaactggatacctgaaaccctagtacttgtttgtttccactttccagggtcatattttttgttacgagttaatatgcatttgtacatctttcttgctctggtgtgtaggtggtttagcactgctgcacaggaggctggtgctgcttggtcttgacagcagacaggtaaatgatcctttcgagggcctcttcgctatcatcttgttgcatggctttggcaagtgatttgatcgttgattcatgtctagtcctgctgcatagcttttgcacgccttcatcctcttattgtaggtaattttctttgcaaggtcctgaacacatgtagcatcagatatcgatgtgaatgattgggattttccttggtaatagttggacagccctctcctgcagaaaacaaatttacttgttagaaaacatatgatttagtgtcaattttgcaattgaagtagattttatggaagtggtctggaacgtttgatcttttaatatcgacattattttctccagtcatttcgtcttttgaacaaaatgttcaaataagacctgatgctgcatacatacatagatcaagcccaatttgaacattttgcttgtcataaatgttatgcaaaatagaatctctacaatttagcaggtaggcaatatcattaaaattcaaccaacaaatctgaaaagctgttcggagaaaatcattgtctagttgaaaaaatgaactagctagtagctactatatcatttgcaaatgtgttcattcaactaatatagtttacagtagtcaggtgataaatccttgtttgctggcacaaattgggaacacaagcaacaaatttcacaccgttaaagcatctaccgaaacttgaaattcatataagcatggtgcaattttctctaactacgagtacttctgcaggggaggagcaaagcacctgataggaagctgggctatcagtgaggacaagtcacagagcggcccttcagaatccagctgcaatgtgctcgaagatgctgatgacgacgacgatgacggctcaagataatcaccaggacggtaagaactcccatcatcactcagatccgatgccgatgagcacgacgacccgatggacgaacccgagaaggaaccatcttcagatcgatcatcactttgctctatgcaggcctcctcatgagccccaggaggcaccggcgcgcaagcttctctcattcttccaggagcaaatggctgcttatctcctgtgtatttttggactccagattttggaaggcaaaggcaagtatccaagttaagttcccctctcttccccatgtgcatatatgtagtagacgcaaggaagagatagggtgaaataaaaaaaataaaactaaaaaagaaacagccgttccggtgggctgatggggtcatggatagatacataggtttcctgtatattcagatagggttcatggactctggcgccgaaaagtaagccgaagctatcctcaagttccttgctccatcaggtcttctagacaggctggtgataaacacgccatatattattacatagttattacttattaatgtagatagataaagtaaaaacatatttatcatgcaatcacatattgagagaattttgctttataagttagatgcatctacatgtggtagtagtgtgtgagttataggggagcatgtgaaaacgatgaggataaacttacttatgggggttgagatgagcatcttatctgatctgtttatccttgaggattaggatagataaggtaaattacggtggcgagaaggtggtgtcggctaaggcatgcagctggagattggtatgcctgcttgtctacggagttgattatgctaatttgagtgtcggattaggttgtttattattgtggtctctggtaaggtggttacatggttgcagccagtcagcttcgatatcggtcaagtcgtgttgtttattttcttttttgttaatggaactgtgaaagcaaccccttgttgctccctttcatccctacacgttcccatgaatgcttccttcctgttcctgttcctggaggtttggcctgatcatgttacttgcaagtctcctccattacgtttttttcttcttcttttggtgaagctactgtttcataaggtgaaaattgttctccagtctccagtgagataaacgcactgttcttctgatcttctctggagaaaaatatttctccctttttaagacttaattaactcgattttttgaccgacacgtcacttcacttgaattccgcaggttccactacgatttgtattgagatccacgaagaaaattaccagaataagattctaatttggttagctcacggtaagaacagttgtgttgcgtgctttaccttctcatgatgtgccgtatgatcgcaaaaatgaacgggttacatttgcacacatctcatgagagtgattctcacgtcaaaggttaaccacgtgaaattcttaaatccattaccattagttatacgatgcttgtcttgtcagcagcaaagctacaaaaaaaaagaatgcattttatatgccgtttccctgataaacccatgtattaccaaacaagaattccacttgtaatgcccgaaagacttgctaccctttcaactttttcttgcaagcttagaacggaggagtcggatagggatggataaagagggaagaacacttcactacacctcgctctcttcattcagtagcctaaaaatcaagcaagcagggaagaaaaaaggcatcactgtgcttttgtatgcagcacaagtgaactggatatgttctaaatttttagtggtacgtaccacgtacgtcgtctgttcttgcgttacaaagatcagaacctgttttgtgttgtttcaacctgcagaaacaaagaaacagaacagatgcgaccactcctcttgacaccgaagccgtgatctatcataccttgcccaagcttcagttatttatatatctttatcactagagctgatctaaccctccaaactgataataacttcacagtatcaccacttgtcacaaggaagaacacaaaatgatgaaccgggggcacagcatagctgttcacatgggcttaaaagagcattacatttccatcttttattcaacttcaaattggaaccaaactggattcactggtctaaaaggcaacagccctagtctttacaatgcgaggttaggttttcatataaggaattaagattaaaacataaaaattgctgattcattgcagtacacgtccaatcatccatggatgaacggaataatagagatggattcctattgctcccatcaacctcgcctgctatcgaagaaatggataatcagtacaacgttctcatatgtacagttgcgcatcaggttgacctgtcaatcttcccaatggtgttctgtcttgcgttccgtagaatggccttatcagcagtgatgaagaagccagcgatgcatgctgtaaaataaacaggaagacatgtaaggtttccagtgtggtcttcaattcaattttgttctgcacatgaatgccaatataagaaaatggggtcataaagtctgtattgaaaagaaactacagaaacagaatctagtagtgaaagctagattgttatatgcctaaacttaaaataatggtcagaatcataacaacatgttaacttccacggttccatactgcgtatatcctcgtagctagttcctactgtgcatatccttgtgaggcaaatgctaccaaagctcattggaacaagctgaaatcattcaatgtcattaacagggataaatccaccaaaacaactgctaaagttagtgattatcatatgcgactcatgaattaggacatattgaacagaagaatgtaaaaagatgcaagtggtcgctaatcagtaattgctcaggtacttcacttcaacagacagaaatactggcaagcttcatttactgtcagtagtcagtagtcaatactaagcagaatatctctgcagcatcttgttcagtactaaaatttaatgggaatcctatcctagaatctgatgagggcatgagggatgaggctattgaaagataaaaattccaaattaaaataaaatagagaaggccaggctgtgagctggtgacaccagttaaacttgagccagcaccatttttcattttccctagaacctgataatgaaatgcttgaagtgcaatacagtaacacaatcaaccttagacttgactttacattttataaaggtctaatttcttgcatgtcccaagaaacaagccaaatcatgcatgagaaacaagccaaatcatgcatgtcctaaatcctaagaaatacgccaaatctgtattgtactccctccgtttcgaaatgtttgacaccgttgactttttagcacatgtttgaccatttgtcttattcaaaaacttttgtgagatatgtaaaattatatgcctgcataaaaatatatttaacaatgaatcaaatgataggaaaagaattaataattacttaaattttttgaataatacgagcggtcaaacatgtgataaaaagtcaacggcgtcaaacatttcgaaacggagggagtaaaacagtatatatccagcaagttaaaatagtgacattggctccattaggtttagcccaatatccaaggtaccagtaaaataagttctacgagatgttagcactttatagtaggtcttcggtcataataactagtataatacaatttgaaaaatgataactttcagtagtatagtaaaccgtacctgctgatatgatgagtgcttgtgcggtgtagttgagattagccttagcccaaggaaggacacggcaaccaaccaactgcagcagaaatgttatttttgcagatgtcagaatatatgcagccagatgaatcaaagtgttccaacatatgaccaggtattgagccagattgtaataaattagtagtagtaatttagactagatttccatttccgtcattattattgatacttgaaacgaagatgcaaacacttgatggaaacaatgatttgtaaaggtgggaaaaaaaaaacataatgtgtggccaacgtacatatgtttcttctaggaagaaattgcacttgaaactatatactattgatctaaagaatgaaactacataacattggcatgacaaacagctagtacataccgtggggaccgcaaccacggtaccagatatggctgcgttcttcaatcccagcgtgactgcctctgcaatgaacagaacacaaagaaatcaaccatactggcattgtgcgcaaccgcgcatacatgaatcggaattcggaactcaggcagcttacttcaccgaaccattacgcacactacatacattatacattgccttctcctcaaccaacaatgcataccatatatcacacacaatctagcaacatcacaagtgaatttgtgtttgaggcacccagaagtgggaagccttagataaacagagccgaattgaaccatgatcatcagatagccactataaacagcttgggaagacaacgcggcgaacccaaaaacccccaatcaaggggagtgatctgatctctctctctctctctctctctttctcccaagaaatctcacaccgtccttcctactactactacatctaaacctcatccctcctcctcctccgcgcaagaagatgaaatcccgctaccatggatggggatttcggagcttggtgagtgggatgggatttgattaccatggacggcggcgtcggactcctccttgggggaccgggcctggaagctcctggcggccatggctccttctcctcctcctcgtcggcgacttcgctgccctcttcgctgctctgctcggctcgggtggagaagaaggcgagtatttttagatcgatttggtgatggtgatggtgatggtgtgaacgggtcggactttgctactactactcgacttgggttagctagcataggcatagcagccggcggctcgcgcacgcgacggccgaaaagctcattgctcacgtcacgtctaccggtgtactagtgctacacatgttgtggcatgtgcgaatggcgatgcaaattcggggatttggaattgcaacagggggattagagtttgtttggttttcctaccccgagattaacaaattagggccaatttgtagttgtactttctttttcagggttaatggttgtattttatttaatactagtagtattgctcatgcgcgttgtaacgggtaaaactaatattaatatttataaaatataatattaatagttaaaatttaattgtagcctgtgattattgtcttaaaacaaacatacatatgaaagcacttgtaaatcaaacttacaaataaaagcacttgtcaaaataaatatcaccagtaacattacaaagaggaaatctattttaaattttagagcttaattttagaattggcttagaggtttttttaatctaattttaaattacactgattaattttttaagttcttttgtacatgaaccaaaatgctgccttttctttgggacaatatcgtgatgtaattttattcgcacttcacggtagatgatgctaaatgatttaacctaaatccaataatgttgtcagaagttcttttgtacatatgaacaaggaggagagccagcaggagctgtcagatgaaaatggatggcaaatatagcataactgcacgcatgtaacgttcctttagtaaattagatgatccagatccaccgacatgtgctaagtttagccaattacaatggtctcacctagtctcaaaggctaaatacagtcgacgctaatatgatcgccctctcaagttctctcttcttattctctccggctcatcatttttatcatggtggagatattatagcctactcaattcttttattctacttgctctaaggtcctaagatactagtactttactcccccacctatcatctttatactgtttatttcacatctatcactattttactagtattttatttattcacctaacacattttgtaacatcacatatccttttacttttttcgaggacatatccttttactgtgagcatatttggattgccaccttacctagtgccaagttttagataatttttggaactaccaatattttaggacatatttctattgatttggcaagttttggaatcaatttaaacattacacatgtacaaacaatttggtagggcaagatttagcactaaaccaaagcacttacttcatttttctaaaaaataacacaataccttatattataggacaaatggagtattgtggttgttgttaccaagaaaatgagaccaactcctcttggtctgcttttatagggaggaaggggctgtttggttcgcgtcttgatgcttgtatgcctggccggagcgccgcctgagctccaacaactatgtgtttggtttgtgcgctgttatatcctgagctagcctgacctgactcttcattagcttgctaaatcctcaggcaacttcattagcctgagccaggccatcgaatttggacgcctgagcttcagtcagctactcttaatgatgcatgtgtcatttattccatactttgctctggtaaaagttgctttttgatattttattattcttcaggcatgtgtgcgaaccaaacacacaaagcttcaggctgcctgatgaggcaagtgttacatctcccaacgctgcctattcggcgtaagtttttctcaggcgtggcccctaggacacgaaccaaacagccccaaagtccccgcgatccattcatggttgcgaatgataactagaagactattttggttttgcaatggcgtcaagccatcaactagggtgacaaataaagaactattttgattttagagttttaatatactacctccgttttttaatagatgacgccgttgacttttctcacatgtttgaccattcgtcttattaaaattttttatgcaaatgtataagatataaatcacacttaaagtattatgaatgataaaacaactcctaacaaaataaattataattacgtaaattttttgaataagacgaatgatcaaacgtgtgagaaaaagtcaacggcatcatctattaaaaaacggggggagtataagcttttttttttcactataagatatgttataatactattttagtcgtgagctagttccataaaaaaaaacagcatttccaaatgagaagggaaaacaaagctaggaaagtcggaatcgcgttgcgtgaaaattatactaggggtggcgcgcgccgttgccgcgctgccggcaacaagacaggtaaaaaaacagaggttacatgaaagttagatatgtatagaaaacaagcatgcgagaaataaattaaacaaaggcaggtagtcatacatacataaaataaaaaagaacacattttattacaaataaaccctacgacctcagcaataaatactatattttgtggtataaatttggttctagtctggatataatagtcatggatttgactaaacatcttgcagaatatcactaaaaagattatattgaccaatggaacagaacttgtcgcttgcagttttcagtaaagaaaatctacaattctgagcagaaaacccaaggaaatttaacacttgaaccacatcaatgaaaaactgatatagaaactttgaaacccacctatgcaagaccaccacgccaccttttttataactctgcatgatcaaactgtggacaaatgcaatgcagtatattataaactgtcacatacaagataaatatggtgctgcatggaattaatcaattaccattaggctggccagtagcatctagcaaacagaggaacacatctctcttattttcagaggagtgttgttattgctatcagttagtaaaactctgtctaacagcccatatttagagggaaaaaaagaaagtgaaaaagtcttctagctctagcctttcctctctgaccaactattgtacatagtgcataaaaggagaaatccaataaaatataatacatgtgcaacccaacatcaggatggcctcaattcattcattgtgccttgtttatatcatctaactcatcatatccctcaattattaacatccatcattgcaaaaaatacacccatgtaaaaaaatttactgcactcctagcactgcaatcaacatacatgtgtactgcattttgttctataaatggtgcttcttgttgtagaaattgttgtagcatgtccactttgtcagttgtgtgcttcaaaatctttggtgttggcattttcagaaaataaacatgaagcaccatggccatgtgtagatataagcaaaataagggcaacaaatgattaaagatagttgtggtttgtagagtataaaggatttaaggtggggatttctaccagatcatttgaagtgtgcatctcgatttcctgagtttgttgcctggttaaaacaacaacaattaggcatgacattcatgacttgttccactttgtttattatatactttaagcccacctgtaagatctgcaacaaatgaaagcagtcactatacaacaataattaaattctgtagaacagagataacatatctcagaaaaatatagtattgtagtgccagctaattaagatgagttaattaggatgttgatggtactaataacaacgtacatggtgatgtctaagttgattctctaatgttttcatgaccaaaggctggcagtgttgtattggcaccgaaagttcttgctcttagttttgtaccattcttaggcattccaatatcttgccagttatttatctgcacaaaaggggaaagcatacaagaaaatgcagatagagaacatcaaaacgtgcacttatgctcaagaaaattatcacagaacctcatctactcacagaattagtttcacatttaggctgtgtttagatccaaagtttggatccaaacttcagtccttttccatcacatcaacctgtcatacacacacaacttttcagtcacatcatctccaatttcaaccaaaatccaaactttgcgctgaactaaacacagcctcaggctataaaagctcgctctatgttttgtttttcctattgaggtagtaaaatgattattacaaatgaactttccatcgttgtaagaagatcctgtggcaatttctatttatcccttggttgttaggccaattgagcaaaagaaggcataggataaaaggttttgcaacatgaaaaagggatcagtatagctgatcaacaattgtttggggctgaacagccctacctaccttcccaaagacatcgtcttctaattatagcctctggctaaccataagaatctacaaaggacataatactttttatgcataaacattcatgttgagtgttcaactgttcactaaccaccaaatcaagattcagtttccttttaaataaacagattatatctaaacagattatatctgtgtgcaccaaggtaatcaagaggtctaatggcaaacaaaaccagcagtatctactgttagccaatctaaactgcaggaaaacacattggcgcattgccaaatactttttgtgcgtaaacacattcatgtcgagtgttcatctgtaaagtagtcaccgaatcgaaatttagttttctttcaaataaacagatgatatcatgtgcaccaaggtaatcaagatgactgatggcaaacaaaaccagcatcatctactggtatacaattgccgctaagctgtggagcttcattcgtggctcgtgtgagaggcaaagcaactatagatggtcgaccacctaaaagaatgaagcaaacaaacgtatgaatctcggtaactaaagattcacaaagaccaaatctaaagaatgcagtacatcagtaacagaggttgaaacaaaacagaaagccaacctcttatgctttttatcctgaaatgatatgctcaaggaaatctgagttatttgctaagaacctgcacaaattcagaaatacatgatagtgagaacctgcaaggctgcaacacacatacaaagggagaaagagaaagcatgacaaaaaaggaaaggagtggtggtaagaggcaagcaggcagccatctgaaacattgtctgtgccgctgcccactggtcaccgtcacatatgagaacgacttcataacggcggcaacgacagcaagggactcagatacacatgaatcctgtatggctttggcagtggagaggcacatggagacgaccttttttggccgcatacaatgctactcttgcttgatgccgtcgccgccggtcggagcggcttcaagcttccgtgcagcaccgtattactcatctcgccaaatctagcacggtgttggaatactcagagtagcgtgcaaccagacagagagaaccgtcgctggatcgacgaactcatcattgaccgcccaacacgccaaatcgagctgtgcggcaccggatagagcacctggtcatggagctccagcgcaaccgccgaatcaaggtactcgtcgttcgctgactgagcgtctcaccattgagctcaagccagcaacaccgatgacacgaaatgtctgagattggtgccacatcgccgccgccaagatcaacagatccagtggctctggatctatcgccgtctctagatcaaagagagagagagagagggagggggaggggggaggaaggagagcaacaagaaagatgagggtggggagcagagatttccccatggagcttaccgcgacactgccgatgagcctcatgtgctagccctgcccttgcctccgggtgaccggatccgccggcaaggaggtcgtggctacccgaatccggcgagcacggtctaccctccgccggaactggcctcgcggtggcaagggggaggtgcggcgatttggctgggtgcaagaagagtggtcggaggcggaggcggatgcggcggtgtggtctagggagagcgagcgagaagagagaggtgacggaacggcggcggctagggtttcgtggggtgagggaccgggatagggatgcaagttgttgcagaaaacccccttagtttctatgttttcgagcgcagtcctattttctgttttttgcttctttgattagaatatttcttttttagaggtcctatacgtaataacgtagaacgtagaaactgtataccagagatctaaaaccaaattatcaattagtttaagggcttttttgcaaaatgatcagcgtcgggcaggcatggacgcacgatgggcatccaacgacggaggaagcaagcaacgcgcagcctccaaattcagctccggagaagggccggacgacgtgtcacgccccggcaagggccacgccagcggcaaacgctgattcgaggctcaattctcggcagctttgtatataagcgattgggtcttactcttaacaggaaaaatgaaaatttgtcacgtgcaatcctcgtgtcctaatccagccgccactgttcatgctcttctcctccgcccgcaacgcaaccgaaaccttctcctcctccgccgccgccaccaccccaccaccgctgctcgccggcgcgattttgcacactcgtcataccggagtgctcgctcgctcgctcgcggtagggataacccggccgggttaggattccgccatccaagggggtgggggaggggtgtgcttgaggcgcgtggcttcggtttttcgtgagaggaaaatccacggcctcgccgtgatcccggcggggattcgtggtctctgaggcactggtagagtggtaggtaggtaggtaggtaggtaggtagctgctgcgcgtgggagggggggagactccattaatctcgcgcgtctagggtttgtttgtgtgtttgtttgggtgggttccgtggtggtttcaatggcgggatctttcgtcgcggtcagggggaagcctcggtcgtccccgaagcggagcggcggcggcggcggcgcggatccgcccttgtctctggccatgccgaccgtcgccgatctccacaagacggctgagttggagaaggttatttatctatccactgttagtaattgattatgtgttgcggcgtaggtgtatgcatatgttatttactagtgatagatgttgcttttgtgtcactaagaaaactttgcttttcagttcttggttgaagccggcctttatgaaggggaggaggagtccgcgaaacgggaggaggttcttcgggagattgatcaggtaattaagttgcttccactcttacttgctatcaatggctagtgctagttatttgttaacccaatgtaacttgatatctctgaatattatacgagttaggcggtgggcgcagaaggggatatgtaattatcgcttaaattcatgcactttgttgccggactttgcttaggcagcattgctttcatgcgcttgtgttgtttcggttttatattattctaaccaaaatgatttactgtgcatgaatgtgttgatgcctgcgtgagtacgatataccaattgctagtgcttcctctggggcacaaaagtcctaactaccaatatatgaacaaaatattcttgatttggagcttgccattacctgcgcatggtaatgcagattaactttgtatatgctcacatgttgttttctttgtataagaattagccctttcttgttgttttatgaggtcttctctgcgtctgtgatattgcagatagtcaaggaatgggtgaagaaggtcactattcagaaaggatatagtgagcaaatggttaaagaggcaaatgcagtccttttcacttttggatcttacagactgggggtaaatgcttctttttgttcctttttccttctaccacagttaaatgatcatgttgatgtttctttctagagtgagtcaagcacaaccaattcgttatcacctgaaattgtcagtctttttagcttccatttagatatatatacaacttgaatataactatggaagtactgttgttgctgatacttggtttcttgatttgttcaagcagaataacataccctagcttggttctttggagctagcaactattttcaaattgtgcagcttttactggattgatgatagactggagtagaacaatatctgataattattatttgagacaagagctgtgtagaaagaatttagagtctgttcatttgtggttcacaatctattgcataggtagtagatgctgcttggttgatggtagcttttttcctgtaaggaaacctgatagtgtggacaactcctgttttttgggaaagatccatatattcatttccttccgtttgtccactacttagctgaacctaagcaaaagatgtccaagaggctgacatcaaagaacaaataacacccataaaaaataaagaaagaaagaataaaaaagtaatcttcagtggataagaagaaatacgattcttatttcgacacaaccacccaagggtagagaaagaccttttgcaccaaaacagaaaaaaccccacaaacgaaactagctccatcacgtactaatgtattttggaagctcttcctatggtttctataactgattaataactagaaatctctcttgtccttcactggataggtctaaaagcctaacatgccaaaacaggaataaaatttgctatatttatgcagtttaaagtttttcatccttttctctaacaatacattcctaatatactgtttagtgcaataataatctcacaaattgctgagaatcattcctggtcatgtttggcacaaataaaatcatagatacctattaaagattattaaaccgccaaaattgaaaagtggtgtttctgtttatcagcgggaactcacggtaacaagagtgtgtatttaataatattttttggttgctgtaagtactttcctagtagatcaattttcctttgtgtactttatgaatagtggcctcttttgttaggttcatgggcctggagcagacattgatgcactatgtattggaccctcatatgtgaaacgagaggtgaagtcttctttttgttgcatgctgtctatggattacttaggtcttcatgatggacattaacagtattatttctccaggaggaattttttgtcatgctatatggcgcattatcagaaatggaagaagtgactgaactgcaacctgtacctgatgctcatgtaccagttatgaaattcaagtttcgtgggctaccaattgaccttctctatgccagtgtatctcttccagtaataccaccagtaagttttcatttcctaggatttcgtacatgaactgaaatgcatgctatgcataataacacacgcttgagatggtgttttatgattgcctaatccaacatctgttagtttgcccatttccattctcttcattggttgcctatcccattagtttctgcaactatggatggatctgctatgttgaaactttttatcaaccaatgtgttgactatgtaaggctgctatttggaagtgttgttgaaggacatatataatgtctaagctaactttaatagcattagcagctatagcctataggtgacgccaaaggcaaaagttaatttgccagcttatacaatgtttacattaatctgtatggtttacttcatgagggagttttaacttgttaaattgtatatttattattttttaatgtaccattgcaggattttgacatctctcaaggatctgtactttgtgatgttgatgaagcaactgttcgaagtctcaatgggtgcagggtggcagaccagattcttcgacttgttccaaatgcggaggtaatttaattatgatatcaccatttctcttattatacagtccaaaccatgtcattgtaataaatatatgctatgtagatcttccggaaaacactcagatgtttgaagtactgggcacagagaagaggagtttattctaatgtaagcctggttttatcatctatgatacacttaaatgtgtttgtgcttggatcaaaaccattagcatcaaaaggtgctgaatcgttatgacgccaaatggtttccttgttaggttactggtttgctggggggtgtcagctgggccctattggttgctcgtgtctgccaactttatcccaatgctgtgccaagtatgctggtttcaagattcttcagagttttcacccagtggcagtggccaaatcctgtgatgctttgtgccattgagaacgatgataaccttggctttgctgtgtgggatccacgtaagaatcctcgtgatagatcacatgttatgcctatcatcacgccagcatatccatgcatgaactctagttacaatgtttcaactagcacattgagggttattatggagcaatttcagtttggtaataagatttgtcaggtgcattatctatgcctcaactttatgcctcagagcactaaattctgcatatggtctcattgcctatctttgatgcaggaaattgagcttaacaaggctagctggagttctttgtttgagcctttccaatttttcgaggcatatacaagatatctagtggttgacattgttgcagatgatgatgatgatcttcggctttggaagggatggattgaatctcgattgagacagctgactctaaaggttgctgtattgtagtagcagtagtttcttattactcctatatatggataaactacaatttttatattatttgaagtgaacattaaaatgaggtctatgaatattccatacttagaaacttatgcaagtttgtctttctaacatgcagattgagcgggacactaaagggatgctgcaatgccatcctaacccatgtgaatatgcagatccttcaatacagtgtgctcactgtgccttctacatgggcttatcaaggaaagagggaatgaaaatacgtggtcaaaaatttgatatccgtggaacagtagacgagtttatgcatgaaattggaatgtatacacagtggaaatccgggatggatctagctgtcactcatgtccgtaagaaggagatccccctttatgtatttgaacagggctgccagaaaactcgtccaccaacgccaatatgtgcagagcagcaagaccagtctgataaaaatgactctgaagtttgcacaacgacagcatctctggtgggtcagctcaagcgaaagtatcattctgttggaggtgctgacgttgactcattcaaatctgttagaagggcttcagttagcccggcttgtgaggaagcatcaattcagttgcatgatgatgcaaattttggactgactaattgctccacttcaccacatggatctgaggggtccactgtatcaggcaacagctgtgcagcagttggcactattggtttggttgatgaaactagctgacctggctgcttgatgcccaatgttgaaaatgatccaattcaaacaattttagagcaggcgccttcagaaagtgtggttgagaaggatgaaagaaaactagaaggaattgaaagcttggcaagtagcaactgtactgaattcatggaggttgcagaagtggtcgctgggacgatccttactgagaatggtgatatacgcttaagtggacatgaagtgatctgaattggccttccagatggaggttttgctttctgtgcactcactctgtactgtgcttatcctttcatttcgttctgcttaaattgactgacctataaatatgaatatggtgttggattggtttgcaaagatcttttcaggtgtggaaccggatgcatcccaggtttgaaagcattcttgaggcatgtcttgtactctcacccttcaaatttaacatttaaaatgttctttttgtctatccggtgttgtttggcaccttctctgccatggaagagctcgtctgtcatgaactgagcaattggcgaggagttgaagagaacaaccacccttgacacaccgaatactttgtcacagattttgtcaggagacggagacttgaacagatggcgcccaaatcttcatcaaatcatacgctgaaagaaaaaaaaggatgcctttcggttgctttcaggataagagaagctctgggattgagaaaccatggaagctcaaatatgaagttcttaggctaggctctggagttatggacttgtggttgtgggaggactgaggagactgagcgagcaccagtgtatcagttaaggtagtgcctttccttggctgctagttaggtctaggtcagtatatttggtagttttaaaagaaaaagaaatagaatgccattattcttggctatccattttcactgtgtccactttcctatacttgtttcagattcgttgatgaagtactggtggtacttcacagggtttgtgaaagattgatgggaaaaagtgatatctaattttgaatgaaggttgttttcatcctggattctaccatgtctcttttcttttttcagtttcaactagctaaatatccgtgctttactactaataaaatatctttttgaagtgtgctacctatgtatttgataagggaagtattcaccttattttgattttatatgtggctatccatttagatttatttttttagtattaaaaagtttaagaagtgttttgtaaaatttacaataggagtgtttgggtagaaaattcactgttaccaccattaaatccttctaaagaagagcatagcttaactagttagatttcttatggtggaaccagcccacccagattcaaatcctagatttgcatgggtgctcgcatttacggctaattattctttcagtggtagacgacgtatccgtcgacaacgaggcgcctgtggtgacttcgtcaatctcaagatatgccgacccagtcttcccgacaacgaggcgcctgtggtgacttcgtcaatctcaagatatgccggccggcccagtcttccagaggtgcttataggggtagggtgtgcatgtgtgcgttgccggcccaatcttctggaggtgcttataggggtagggggtgagtgtgcgctgcgaggcgcctgtgggcccagtcttccggaggtgctcataggggtaaggtgcgcatgtgtgcgttcataggggtgagtgtgcgcctgcgtttgtactgtgtttctaaaaaaacaatctcaagatatgccggcccagtcttccggaggtgctcatagggcccagtcttccggaggtgctcataggggtagggtgtgcatgtgtgcgttcataggggtgagtgtgcgcctgcgtttgtactgtgtttctaaaaaaacaatctcaagatatgccggcccagtcttccggaggtgctcataggggtagggtgtgcatgtgtgtgttcataggggtgagtgtgcgcctgcgtttgtactgtgtttctcaaaaaaaagaagtgttttgtaagaggaataagtttatctgacgtccctcaattgtacgaggagtctgtgggatcccctaaccgtaataccagaaatgtgtacccctcaactatgtaaaaccgttcaaaaaatgagtacccctcaactatgtaaaaccgttcaaaaaaaggttccaagacagtttggatgcccggtttcgttgacgtggcatgctagatagcaaaaagaaaaaagaagtatgtgggacccacatcctagtcagcatctcttttttcttctattctctcttttcatttttgttctgtctacttttctcttctttacccaccggtagcagcggggtgagaggcggcaagaagatttcatatagaatcgaataggagataaatcaaaatacagaataaaaaataaaataaatttcaaaaatagaaaaaataattataagagttcaagtagaaatacaattttaaaatagctgaaattcggactaaaaataagtaacgttggaagaagagtttatatagaacggaatacgagattaattaaaatttgaaataaaaaataattttttttaaaaaatataaaaataattataggagttcaagtaggaataaactttataagtaataaaaaaatattgcaatgaaaaataagaaattttcataaaaaaagtagttcatctaaaactcaacaatgacaaataactataaaaaggagagaagcaatatactcgtaaaagagtagagtaaattttctgtatatccttgaaaactcactcaatccctttttatacttctcaaatttacctgattccttctatacccctgaaaatttaaattgatcccttccatgcccctacaatcacattttccttcaattcaccgttaagttggtggcaaatatctttaatgcccttgatgatttaggtttgaatataagcttgaaaacgattgaaaatttcagttgagtgcacaatatgtgcattttaggtagaaaatgaaactaaataattagtgcggaaaattttgacaaaagttttgaaaataaaaaaagaatttttatttgaaattcaataggacaatatatttttttaccgggagcattcataaaaagaatatggtgagcactcgtagtcctatctttgtatgaatgctcctcatttttatgaattttttaaaaataaaataaatacatatattttatttcattatctaaaagtaaattttgtcataaataatgtatcacacatcaaactcatgactataatagtctagtgcgacaaacttttacatttccaataatgtaattcataaatttgtatgttcatccaaagggtaaaatgatcatttttatagaaattagacggtcaactgacgggaggggcatggaagggatcaaaatcaaattatgggggtatataaggaagtaagaaaaattcaggggcatagaagggattagctaaaattttaggggtacacaagggattttctcaaaaaagtaaaatggcggcggttgatggaacatctaaaaactataagcaaaaccacaaatagaatcccaatgacgattaactggagcaacgataaatagaccggtaggtagcaaggtcacgacggttggcgggacttctagaaagtaaaaaataaattgcaatgacaatcttattcgatttttaaatctcaatgataataaatagggaaggcaatgcgcgggccatatggatacaggagtatagtgccggaggtagcggcggttggcgggacttctataaagtaaaaaaatgaatcccaacgataattatgtttaatttttaaaatcccaataacagtaaataggggagacaacggacgtgttatggaggagtacaatggcgacgtttgatgacacttctaaaaattataataacagaacccgatgagacaatggactctagaaactagaaggtccaattaattaacccaatttttaaaagatttcaagaaggataagtagaagctgtggtagatcaggcaaacaaaatagaaggatgatacaagagtaagaggtagcggctaatatgacttctaaaaacaataaaattaaaaattaaaggatgataaggttcaatcttttaaggttctaagacaacgtgaaggctatttaacaaattttaagtaatatcatatattaaaaaatagataattttatatggatactagccacgtaattgcgcagggcaccctgctagtttcactcatgagtcatgatatggattgacatccgttcattcaataaaattttaagtgattgccactttaccattcgctgtttaccaaattagcatgatgtatttctattcaatctctgatttaaattcaacagtacagtttacctttatgcatattggcaaccctaagagattgcttaagttttttcggcaggaagaccgcccatccggatacattaagaaagagaaaaagttacaagaaaaaatacgacagtacaccagtacatgtccaagcactacacgctaaccacgcaagcacaaacaactcagagttgcatattatgttcccaccaatatgtagaactctttattgaatggcttctttttcacctttttgttttcacgtttcacaaatcatataatattttgttcacacaaagtctcacagcaacatacgaggtaacatctagtttagctgacactagaaatctgaatacgctaaagcatggaggggaacattttacccgtcctcctcaatgcacgagaatgtttgcttgtaacagaaagaaaatgatgcaactagtgaacacgtgtgtacatgttcgtaggtaggattgatttttttagacggaggggtaataaacaagacgatttgatatggaagtgatcgatcagacgaaacaggggaatcgtctccaccagcgggcacactggcggaggcgtcgaagaacagtctgcatggacggcctgcgctgcgggtccatcatggtgcactccacgccgagcttgaacacggccttcatctccttcaagtaccgtgccgcgtcagaggcgatatcgttgtcaaggacatcgtcggtgaataacttatcgtcgtagccttgccgtgcccatgtattcaagtaggcttttgcccatgtcgtcagatggccgtgctgatcgttgactacttttcccgtgacgatctccagcaggacgacgccaaagctgtacacgtcgaccttctcgctcacttcggtgtccgcatactctgcagcaaaattaaatggcagccagtcaatcctgaagtaacatgatcgttaactagtttaacgatttctgaattgggaacgtacgcattaattaattatgctgcctcacctggagcaaaatacccgaaggcccctgcatgaagacggacgtttcccaacagcgtgttgcggccggcaagattgatccgggcataactgaagccagagatcttggccttgaagttgccgtcaagtaggatgttggccggcttgatgtcgccgtgaatgatcggccttcgacaaccgtgatgcatgtagaggattgctccggcgacgtcaatgacgatggccagccgctttcgccagcccagcggcgggcgcaggcgcctctcgccggcctgcgtgttgtggtgtatccacttgtccaggctgccgttctccatgtcctcgtacagaatcaagatcatttcgttcctccgaatgtagcctaacaggataatgatgttggggtggacgatcatgccgagcgtggtctcctccgtttggcgccggttctcgagttcggcgtccacactcctggtctcgttctgcatcttcttcacagttaatctcctgtaggtgtcgctgctgtcgttaataacccccaaacggtacagtgggtctcctgtcgttgtgcctgtgctactgatcctgtttacgtccacagcgttgtggactagatgatcctccattttatcacttaaaactataggagtcatgtcgtcattgcgagccctgcatctgcaggatgcgacaacacatcctacggcaaagatgaccacgccaccagcgattacggagatgggcacgatgctgttggacaggttgagatgctgcatatctgaggacagcttgtcgatgtcgtcagggagtctgccggataattgattgttggataggtcaagtaactctaaagctgagcaagcgtatagcacagtggggaaatcaccggtgagattgttgtaagagaggtctatggaagtcaggttcttgaggctgtaaatggaggctggaattggtttggctatgtggaaacttgggaggaagaggtgagaccccctcaagtctcaagcgtggaatattagagtgggctacaattattttatttaattgcgcgtcagctaggattcgaactcgagacctctggctctgataccatattaagttgcatgcaccagccagttgcacctaaaagcctaagctgatagggaaagacgggcaattcattttatacacttcaacagtcggtgttgggctgcaccgtcgattgggagctggactttaaggggagaaacagtagtagtaagatggcgagaatgttgtagatagccaatttttgtgtgaagtatgttcattcttggatgctcaagacatggggtggggtggggtgagcttaaataggcactgccgaggaagacgaacccaattttttctccgatactccagtgaatgatactctgatgccaacttgccaaggcaaaaggaaaaaagatgctcgatctgatggaaacatgtgaattcagcactacgctatctagttttcatgagataacactactatagaacatcctatcagtgttgtctctatcattcccggtttaattaaacccggcactgataaagattatttcgtaccctccaaactcgtgtgcattctaaaaaacccgaccctgatcacatcagtgctggtttttaaaaaaacttggcaccgatggactaaatggagagaaaaaccggcatcaataggtggcggcgagaaaaaaattaactccggcctactccttttttcgtcaatccccaagggtgtgtttgaggagaagatgattgaggagattggaaagatacgcaaaacgaggtgagccattagctcatgattaattgagtattaactattttaaattttaaaaatggattaatatgattttttaaaacaactttcctatagaaattttttttgcaaaaaacgcaccgtttagtagtttgaaaagcgtgcgcgtggaaaacgagactcaatctcccctgtctccccgacaaacagagcccaagtcttctagcctcatcctatctcctcgccctccccatctcctttttttgcgaatgccatcccaacatcttctcactgttcctcagatctctcctccaaggtctcccccggagacatcgctgctcctccacgctttgtccataacggtgcccgctcctccttgctacctccgagctctctccctggcggtgcactctcctcctcgccatttcctcgtcgccttcgggctttttctccgtagctgcgccggatccagtcacctggaggccgggaccaccggatttgttcttcttgaggccagggcttgccgaatccaaccgcctctgacctcaccgccatggatcacctcgcacgtgcttgggggctggcggtctgaccggaaggagttgatggcgacagcggcgactcaaaggagatgagcagcaagggaatctacaacgacgatgacagatcctctgggatggtgagtccgatatgttgaacatgcaatggtcagccatagtgcaagattttgatctatgttatgaattgttctgatatatgatgtgattagcttgttcttgtcttcatagtatgtgatgtgcttctttgacatgtgcatatgctcgtgtgctcttgttgattttgcatggcccttctgtcggaacctcagattggtgggctcaaattgattgcgtgggatcgaaggagcaaaagaagacgtcgagaggagctctgcttaccacttggtggaacgtttggttagaaagaaacagaagagttttcaacaatatttcaatctcagagagagagagcagtggcatatatcgtaaaacaagatcttgatctccgtacctcggcttttaggcccattaaattttattgtttcgtgccgtgtattgttgtactgtttttcttttaatttcttctggactgaactggctttgtattgttttcccctttctaattaaattccgacagatctcctgccgtcgttctcctcaaaaaaaaaaagagagaggggggggggggagggggggggagattgcaaatggggttgggaatgggggcactcgaagcatcagctcgattcgagccgatgcttcaaggtggcctccttttttttttaactcggggggaacacatcagtgccggttccaaaattgtcattttctctagtagtgataataagcatcatgcaaatcataatcattttcttagagtagtggaagacaatcacttggaatatattatgattatcacttggaaggaaaataaataacttatttctcatctaattaaccacaatatatatcacatcatgatcatgtaatcacatcgtgtattatctaaaaattgtaatcacatcatgtaaactaccatatatggtgacccgcgcagattgtgtggttagcatcgttacattttttcacataatagcatatatattcacactttattattaaaatatattaaaatggcaacaaaatattaaattatgtatgaacttgaccaaactaaccaatgtataatgtattatatatatacgtgatagtggttcattattatttttatttctggattcttgtattccaatttggactctagacacctcttctaatataaattccttattttaaaatttttaagtttcacaatttatattttttattcatatatggactctaaacccttctttcaatattccttatttttaaaccctgaatttcagttatttctaaattgtaattctgtatgagctctagtcttctcttccatattccttgtttttaattccaaatttctgttatttgtaaattgtatttatatatggattctacctcttcattcaatattttttatttttaaattccaaattttaggtatttctaacttgtattcctatatggactatagactcttcttctaatattcttttttttaccttcgaatttcaattatttctaaattatattactgtatggacgctagactcttatcctaatctttctttctttttaattttgattctttctaaattgtatttctatatgcactgtaagctctactttagttttcttatttttttaattccaactttcaattagttctaaattcctatatggactctagatgtttctttcaatatttcttatttttaattctgaattttggtaatttctaaattatatttctatatggactgtagactcttatttcaatattgcttatttttaatttagaattttagttatttctaaattttatttctatatggacgctaacttttaattttcttattttttaatcctgaatatcaatttgctcaaaattgtatacttgtatggactctagtctcctattccaacatgagaatttctaggccgttagagcaaacgtggaggctcctttctttattactttaataagttaatatatgaatgcagctggtaaaagtggtggttaggtttttcatccaagggactgatatttgtatccaataatatttgtaattttgattttaggactaaataataaccgttataagtaaaatgagttggtataaagtacaacttggtaaatgttaatgaaaaacataaaattattaaggtattaataataattttgaacctcagagttattaaaccatcgtaaaatgataatgcatattctgaaaagaagtgaaaaatttatatttactgatgacatttggaattgcttatttaatcataaaagtcttatgggaagaattcttccaaattatatggactattcttttagtctaaactagcatggtgaaccgttcagattacacacttagcatcaatatactttcttacacacacacaaacataatttcaaattatgtatgaaattgaccaaacaatttattctttggagcataaatttttaaattcgaattttagttatttctaaatcgtattcatatatggattctatactcttttccaatattccttattttttaatttcgaattttagttatttatgaattgtatttctatatggtttctaacatctacttttaattttcttattttcaactccgaatttcaattagctctatactgtgtacctgtatggactctattcttctcttccaatatttccttttttttattctgaattttagctaattttaaattgtatttatatatggattggattttttttactgtttctccgataagcatgagaacttttaagctgtgagagcgaacgtagatgctcttttttctaatactttaataagttatcagatagctatcatttgaaattaactaatgtatttcacatatcgttggaattttcatattgtatttggctgtggcttccacaagctactccctccccgtgggaaaatataaggattctataggttgtttagaaaaatatgaaggtaaagtcaaaatattcctttataatcatttgaattgttaaattttaagtacttatatttcttttccaaacatatgattagctttataattattaaataatgaaaatatattttaaacaaagggagtagattattccatccctcatctagaggggatttcttttatttttttggaatcatctgaagagaaaaatttagtgcttgcttacgatcgtgtgcgtcgatttctgcgcacgcgtggcaatggcatgtaggccgtgtagtgtataccctaaataatgtacgtggtgtttggtacaacaaattaaagattgttagtaactcaaatgtaaaagagattggtttacagtcacaggggcaaatgggttttgcacatatagcgataagcgattgcaaaggaaattggccatgctaaaaacaaactaaaaaaaagtaaaagtgtccaccttaaaagagtcaggccataagcatcaccaattagttgcgctagttaggaatttaaatatctagcgtgagattggaagacactgattctactgagattcctaattcactatggcgtgacaacgcggattaactaccgcacccgctgccttttactcggcgatttctccaaaaggacggaggaaaagaagcttctgtacggagaaaaagaacggtggtagcgaagtgacctggcgaatattctgaatctctggaggagccggcgccgcgggttgcttttgaaaatgctagacaaacgactactacgttcgactgtcatacgatcacggcgtatgcgacgtgtgatcctccgtcactcgtttgaccttccaaaagcccaagtcgaagctaagcagctaaataaacgttgctttgcatatctcgtgaaacagtgatcagacttggacacttggtagtagtcttgtgatttcaatcggtaaactaaacacaacatttgcatgttttatttttatttaacaattagacactatgcttgtggttttggatgtcactacattaatatctatctactccctccgtttcacaatgtaagtcattctagcatttcccacattcataatgatgttaatgaatatagacatttatatatctatctatatttattaacatcaaaatgaatgtgtgaaatgctagaatgacttacattgtgaaacggtggaagtatctatctattatattattaaaataactttttgaaaggagacattacgttcgctgtgggggctagaaattccgacattaatcggagaaaaagaaaaaaagaaaaagaaaaaggagagtccaagtagaagtacaatttaaaaatagctgaaattctgaattaaaaataagcaatattgaaagaagtttccatataagaacccaatacgagattaatcaaaattcgaaataaaaataaaataaaatccaaaattagaaaaggaaaggagagtcaaaatagaaatacaatttaaaaatagataaaattcgaaattaaaaataaggaatattaaaagaagactccatataagaacccaatacgagattaattaaaatttggaatacaaataattcccatattaatcggagaaaaagaaaaaaaaaagaaaaaggagagtcaaagtacaagtataatttaaaaatagctgaaattcggaattaaaaataagcaatattgagagaagtttccatataagaacccaatacaagattaattaaaattcgaaataaaaataaaataaaatccaaaattaaaaaagaaaaggagagtccaagtagaaatacaatttaaaaatagctaaaattcggaattaaaaataaagaatattgaaataagtttccatataagtacccaatacgagattaatcaaaaatgaaataaaaataaaataaaatctaaaattagaaaaggaaatgagagtccaagtaggaatacaatttaaaaataattgaaattcgaaattaaaaataagaaatattaaaagaagagtccatataagatcccaatacaagattaattaaaattcgaaataaaaataaaataaaatccaaaatttaaaaagaaaaggagagtacaagtagaaatacaatttaaaaatagctgaaattcggaaataaaaataaagaatattgaaataagttttcatataagtacccaatacgagattaatcaaaaatgaaataaaaataaaataaaatccaaaattagaaaaggaaatgagagtccaagtaggaatacaatttaaaaataactgaaattcgaaattaaaaataagaaatattaaaagaagagtacatataagaacccaatacgagattaattaaaattcggaataaaaataaataaattcaaaattagcaaaagaaaataaaataagagtttaagtaggaatacaatttaaaatcagctaaaattcggaattaaaaataagcaatattgaaagaagaatccatataagaacccaatacgagattaattaaaatttagaataaaaataaaataatatctaaaattagaaaaactaaaagagagttcaagtaggaataaaattttgaaacaaatgaaattgaaaataaaaaataaaaacattaaaataacacaatacgatattaaataatttttttaaaaaaattctgaaattagaaaaagaaaaataagatttcaattaggaatacaatttataaataactaaaatttgtgataaaaataaagattattgaaagtccatttaaaacccatgacgagataaattaagtaacatgcctataaaggagtacgagatataaaaattattaataaaacaccaaatataattctaatgatgattaaaaggaggaacgtcaggcaggccgtgaagcaaacatgtaaggcggttgcagggacttctagaaagtgaaaaaaaaaaacaaaccccattgataatcatattcaatttttaaaatctcaatgacgataaaaaggagaagcagcgggcgggtgtataagagtatagttatagagccgtcaacggttgacgggacttctagaaaataaaaaatgaattccaacaataaaaaggagaagcagcaggcggggtgtataagagtatagttgcaaagccgccgacggttgacgggacttctagaaaatgaaaaatgaattccaacgatagttatgttcgatttttagaattacaataacaataaaaaaatcgcaataatttggttacaggcatggcatgatgtaataattctcaagagggtattaattattggattttaggtgtatggaatttgtgaaatccaataaatggtttcactttacttgcagtaataccctctgaaatactccctccggcccaatttataatagcagaatgcttcaagtttccactgttactatgactggatcgtcggcgttagagaattcttctgcgagttcaaccgatgccgttccgaaaatgctgttcggcgatcgatcgccctagggatggggtagcgatcagattcgctccccacctccccctccctccctccacctgtttccttttttggcaccacattattttcatattttagtaaatttatgcacctaaagtttatacacctcaagtttacacatctatagtttagagaccaaaactttataagtcaaaagtttatatatccaattcaaatttgaatttgaattcaaatatttttttatatagtatttctatacatctaaagtttatagacctaaagtttatatacccgtttcaaatttgaatttgaattatatctgattcaaatttgaatttgaattcaaatattttctatatatagtatttctatatatctaaagtttatacacctaaagtttatagacctaaagtttataagtcaaaagtttacatacccgatttaaatttgaatttgaattcaaatattttctatatatagtatttctatacatctaaagtttatagacccaaagtttagaagtcaaaagtttacatacccgattcaaatttgaatttgaattcaaattttctatatatagtatttctatacataaatttttctaacttttgttttttttaaaaaaaattgtgtggtgtactgtagtagaaagacaagaaggggagggggaagggggagaagagggaggagtataggggggagagggggcaaactaatcgctgaagggcccataccgtaccgttcactcatcagtcatcaagccctgtcaataggataagcgggcgaagtcacctctttgtccacaacctgctgacacagacgtgcgcaagccccgttctcgtgacagaacacatattatgtaaagcataaaaagactttcgatagaacagaataagaacatttcgactaggaaaaggcaattcatgtccctccttccaagtaattgtcttgtaccacaccagaaggtgatcatctttttcattcttctaatcttaaatacattcaagttggaccaaagaggatagcatagtgctcaaccgacaactcacatgtttctaccaggttatctttcgactttcgctcactggaggattgaagctaccacgccgaagacttgaccagtgaggtagtgaccacttttttgtcgttctctccgccaaccttatttaagtggacgccatgtaacatccaagaacacaccacactcgcaaaaatggttgtctacagcatcctcatcctctttctactactattgatcttctccatctccaactcccaatcggcggcgcagcccagcgccgacgagcaaacactactcctagcaatcaagcaagattgggacaacccagctccactcagttcatggagcagcaccggcaactggactggtgttatctacaacaatatcacaggtcaggtcactggcctctccttgccaagtttccatatagccagaccaaacccaccctccgtttgtagactcaagaacctaacctacatagacctctctttcaacaatctcaccggtgatttccccacggtgctctacggttgctcagctttggagttccttgacctatccaacaatcaattatccggcaaacttccggaccgcattgacaggctatcgttggggatgcaacacctcaacctgtccagcaatgctttcaccggcgatgtgccgttggctattggaaggttctcgaagctcaagtcattggtacttgacactaacagcttcaatgggaactacccgggtgccgccattggaggccttttggagcttgagacgctgacgctggcgaaaaacccgtttgagccgggtccagtcccaaaagagtttggcaatctcacaaagctgaagttgttgtggttatcatgtatgaacatgactgggaccatccctgatgatctatcgtcactgacagagctcacactgctggacttgtcacaaaataagatgcagggacaaattcccgagtgggtattgaagcaccagaaactcgagaatctatatctctatgcaagcaatttgagtggcgagattggtcctaacatcacagctctcaacctgcaggagcttgatctgtccatgaacaagttctctggatcaataccagaggacattgcaaacctgaagaagttgagattactatttttgtactacaacaatctcactggacccatcccggctggtgttggtatgatgccgaacctcactgacatccgtctcttcaataacaagctctctgggcccctacccgcggagcttggaaagcattcggaattggggaattttgaggtgtccaacaacaacctctctggtgagctgccggatacactttgcttcaataagaagctctttgacattgtggtgttcaacaatagcttctccggcgtgttcccgacgaaccttggggattgcaaaaccatcaacaacatcatggcatacaacaaccactttgttggggactttcccaagaagatatggtcattcgagttgctcaccaatgtcatgatttacaacaacttcaccggcactctacctagtgagatatcatttaacatcttaaggattgagatggggaacaatcgcttctccggtgccctcccgtcggccgccgtcggtctgaagagtttcacggcggagaacaaccagttctccggtgaactgccaactgacatgtctaggctcgccaacctcaccatgttgaacctcgccggcaaccagttgctcaccactgtcaagatttatattaacaacttcgccagcactctaccaagtaataagattgttagtaagtcaaatgtaaaagagattggtttacagtcacaagggaaaatgggttttgcccattgcgataacggccgattgcaacgaaattggccatgctaaaaacaaacttaaaaaaaaataacagtatccaccttaaaagcatcaccaattagctgcgccagctaagaatttaaacaacttgcgtgagattgaaagacactgatgagattcctaattcattcaagaaagcgtcacaacgcggattacctaatccgaccttttagctccctgccacatgtcttacgtaacgctcggcgatttctccataaaggacggaggaaaataagggtgagtgcgatgctggccggagaaaagagaggtggtggcgaatcttgtgaaacagttatcagacttggtatttcaatcggtaaaccaaacacaacatttgcatgttttatttttatttaaaaattagacactatgcttgtggttttgaatgtcactacatttatattttgtttaatccaacctgttatagccatcaaaatataacttaaaactgtgatatataaaaatggtaaaaaaataaacttgtctagaaaatgagcatctgcagctgttaaaacattacaaggattttggatgtcactgtatttatattttatctaatgcaacctgttatatccataaaaaaataacttgaaactaggggcgaagccagggaggcctggccagtgccctacccacccctatataacctcctcatttgcttaattaacatagccccatttgcttaactaaccctgattacctgctcttaactaaccttgattaacttcaatccaactactcaggcctgtttcttttagcttgggattattataatccggattattggaagtaagctgaaagaaacagacaatttattgaagtagcttattataatctgataagctcatttagtttagctttttccagattattgggtgaaaaattacccaccatgccaccccactccctctttagactggcaaacccaataatctaggctctaataatctaggaaagaaacaactaaccgcttattctactacagattataacaatctagcttatagtaatctgactcaataaactagattataataatccaaagctgaaagaaacagggcctaattggcttgtcagcttggtgagtaggttagaacggaactaattaaattgaaatcagatcaataattggccatttttggcaggtataacaacaaacaaaatcttacaaatgctgctcaacgctacaactccagttggccgtcttgcggaaggagagcttgaagcaggacctgctgctgcgctcctgttgtcactaattaacttttttactggccaacgcccaaagcaatccactggtgtcacaaggtctagcgtactagtgttacttgctgtaaaattcacacatgtacatgtactagaacaaatggcattagtttcagctgacaccaactaacaaatgtcaaaaaaattctagaaacatttttatacatgtattttcaatattttataactacatataaaatttcatctttaaattcatcatatatagagagcaaaagacaaaattataatttatagtcttacaactgtcagatatttttttttctaaaatataatgaatttgaggttaagattattttacacataggtgtaatattattgaaagtaatatgcacaattttttttagattttttggtgacatatattagttggtgtgtacggactgtgcacgagaaggttgtgtgcacaaaatatgttcccttattatagatgcatcacttttattgctacatgtactgctatcgctggttaaatttgcattgctaaaatatagtcatccactactacaaaaaccttaataggtgacagctcataggtaccggatctgctgccgcgcgtgagggcgggggggcagatcgatcgacaatgcgatgacgagggtggcagaatcgacaatgggggaaggccgtatcgacggcagtggcggcggcgtgtgcttgtgtttgcaattttgttgattttgtgattgagtttggttgatgggatgatgttgatttcagtgatgattttaattgtgtttggttgatggggatgatattgatctcattgatgatagagagctcctcgattcattggctcaattcaagctgatgcatcgagccaactttcttttttggcaaaattggttatatagcatcgaaagttcacgtttttggttttatagcaccaaaagttaccggttcactttaatagcactcaaagttcaccatgttcccatttttaacactttcgtcaattctcgatcgttttctgtccgtcttgatccagccacacatacgatatgacgtttctacccctcacaagtacaagtataatgcatgtcaatgaggggtagaaatgtcatatcatgtgtgtggctggatcaataacgatcaagacggacggaaaattgacggaagtgctaaaaatgggaacagggtgaactttagatgctattaaagtgaactagtaattttcggtgttataaaaccaaaaacgtgaactttcgatgctatataaccaattttgccttctttttttgctttttttattcctagaatctcaaaggtgtcggttcctaaaccaatatcttagagtcatcctcaaaggtgctgcatgctaggtgccgattaggaaatccggcaccgatccctttttctatcgtagtgatcctattcagatgacggcaacaatatttaggccccctttaggaaaagatgaatttggataattttaatcatataaaagaaatcatgtaaaggtctttaaaataaaatattcaattacatcctttgttttaaatttcttacagaatggacagtactatagaaattctagcgaaaagttagcaagaatttcaacctcttggaatatttactttgagtatatctcttttatttgattcctgcattttgttcacggcctaatcgaacgactatttctgtattttcttatgatttttaatcccttattattttacatgtgcattccaattaacaattcattcgttccaaaacaattatcaaaactattatgatcgactcatctcatgggtcccaaaggccacgataacgtaggcctatattcggccccatgtcatgcagttcagcccataatcggtgggcccaacaaggcggctaaacttccatgcttcacatgttcctttatcttattttttttcacatcaaatcatttgatgccaaaaaaaggccaaaattttggcatagttgccaaaatttggcaggatttcttatataggtatcaaaatttgacagcaaactaaatgtagccacttttttttataactttaccaaaatttaataaggttgaaaatagcatcaaaatgaacagccctatactacacgattagctagtttagcagcatttcaaccacaaaaactaattagcaactattaccagcatgcaagaattccaacacaacatacatctccatattattccgaattagttgttgctaaattgtctcatcacagtacattagcacttatcaatttattatctttccgcagcttgctttgcaaaggtccaaagacggatagcagatatcgttttcaacgagcatacaacaccagcagtctctgcatttctctgtgttcgatccttgtgtgcacggcagcgacggtggcaaattaattttctccccgaacatgtcatccatggcacagcctatttgtcaaaagaattttttttaaaaaaaggattagtatatgaaagggtaaaatcagtataggcaaaataggatttcaaattttgttgaaaaacaaacaaattgaaacacttacattgtgcatggatagcaaagcacccaagaagcagcagcattagtactgcatagacatgtccattaccgcacttcaccatgctagattttactactacccttacgtactctttggatatttaatatgtaaatgataatctgattgctggatgcttttgcatagcatatgcggttgtatatatatatatagagagagaggggaggagtggggtactggggataaggtagataaaacaggtactagtaatacttcaattttgtatatatatactctctccggtcttttaacatatgacgttattattaaaaataacgcatattaatgacaggagaggatagaatatataatcttatatgtgcctatatttatgctatatttaccttgtgaatttatttgtttcagttaaatattacgttattaaagtataactattttgtgtcatatccttcctaaccagttatgaaacgactatgataattcgaaattgaaatcgccttaaacttaattttatacttgtgagaaaaagaagtccacccttaataatcaactagtagtaaatccaatgcactatcaaatcgacgacaggtggtttgaatatgactagagaggcttggtttgaatatgactagagaggctactaaacacctattagcgccaagagataaggtggaggataaatagagtagctcgagaggttgggcctattgaatttccaaaagctcatacggatggagtacttgaggattttcccaatctcctatagaaaatttaacaaagaaaagtgtttgtaaagacacatttttttagtttgtttatccctatataatttctgtggcaaatttcttatcacaataaaaaatataattaaagatgtgttttggaggacgtgtcgttgtccaaaacataaaaaatgaattggaaagagcagcagccctagtcatatgtttttagatgggttggctgaagaagggcaaccattttgattaaggttaggaagggttttcttacgacgaagtacttgacatcgacataacactgttgaggctagtgatgaatcactagagaaacttaacacttacattaccggagctacttagaaaaggatttgaaaactcttgctctctttgaaagtaatacttcatctttgatttcaccaaggatttgaaaacctattgattttttgatagatttggagcttcaaatcttacagaaatttcaaccaatctatacaacccattttaaataaaataacaaaaaagacaaatatgccaaaaaatcataaatttagagaaaaaacactgttgaaaaaaaaaatctaatttagatgcactgtagctaaaaaatgtaagtacattgtaacagagtgtaagtgcgctataactaagtgtataagtgtaactgctaaggattttttttttcatctaagacaggagcccaaaaatctaacacaaagggacatagcaaaaccgtttcaccaaatgactgcccaagcgtgcaagacggtacccctcaaacacgctggcatttctctcctttctaaatcgaccagcagaccaacatgaagaacgtgttgaaggatttcctgtagttcatccgaaaagcaccgccaccaccactcacccatgtcgtgtaagttgaaaagggatatacccacccaggctttcaacactccaaattctgttggtatatatatatatatatatatatatatatatatataaaaacgcaagagacgaacaaatgcttcaatctttgtgagctgaagcacatagatggcaactccgttgatgtggccaatttcttttgaggagattatcggctatgaggcattttttccccaaccagatgaagaatttgacatttgacagtgcgcttatcttccatattagctagcttgcgcaggcttgatctctcaccttgctgtagacacagagaaagcaactttagtctatgagcttccacaacacctgatcattaattcttcctctatttgcagctctatttgtagaggattcggagttgagtgaaagtggaaggccagacctaggcaggattaatatcctatacgaaaacactttgacggtgtcctctactggtcatagtatgaatctaacgatgactcaagctaatccaactgtttgcacaaccatgcatcttgttgaattgcacacagagtagtcagttcatcttaaaatctttggtttgttgagaagaacggacaattcactcgtactgggactgtttgacccatggttgatcatctcaatatccaaattaaacaatacaatccgaagaatcatcgatgtcaaacacgcctttagctactacgccatcgctatgtgttccgctatgatcaaactgcatgagccggtggagaacatcactcatcggaggcctcgacgccggctcctcactggtgcaaaccacgccgagctcgaacacggccaccatgtcatccaggtaggaaggatcctgaatctcgccgtcgaccaagtcggcgaccgggccaccattgttgtaccgcttcgatgcccatttggccaagcagctgccagactccgtgccaccatcttgcggccctcggccggtggccagctctagcagcaccacaccgaagctgtatacgtccaccttaacgcttacctttgacctgtatgcgtactctgcaataagcaaattaatacaccaaatgtatgcacacctcaaattcagacagattataatggaacattatgatattgtctatgtgccctctagtgtagattgcgacaaaaataaatgagtactttaataaaccctttgctggaagtgttctaatacaaatagaaatagtagtaggaattttttagccgaaattggtcaactataccctatcgcttctacttccaataattaattaaggtgataaagatatgaagacttcgcttaaaatacatataagttgaaatcatttctactacagtagagagcatgataaaagttatataaatatagtagatacctggagcaatgtagccaaaggtgccacagacggcggaggccgattccgactcaccagacttggcaaggatacgagcaagcccaaaatcagcgatcttggccctgaactcgcggtcgagaagaatgttgctacacttgacatcgcggtggatgaccggctgcacaaaatcctcatgcatgtagctgaggcctctagcaacatcaatggcgatggccacccttgtcggccagtccaacggcccgcttttgccggctcgcttgtagcgttgcagccattgatccaggctcccgttctccatgtgctcgtagacgagcagcttcgtctcctggctagagatgcagcagagcaggtcgacgatgttgctatgccggaggtcacccaacgtcctcacctccgactcaaactccttgtcgaggttcgtgtccagcttgctggtgttgccgatcctcttcacggccaccgtccttggggtacagccaccgccatgtcgtcccgccttgatgtcgccgccaaggtggatacggtacactttccctgagccacccctaccaatcacattgcactcgctgatattgctgacgatgtcatgctcggtgaaatctatcgttctgaattgtgtcatcttccacgacgtgacatcttgtggacctttcttgcgcctgaggaggagaagccatccggtgatggcgacactagcaagagtaatgcaaggaagaatgaccaatatggctcttatgctcagtgcaaggtgatcatggctcatgctttgactccagggacatgtcctgatgtgcatgccggattctgattgacaacagagactagggttatccaagaagctgtcctcgtatgctagcgtttgcaatgctgctgggacctcaccggagagctggttggatgagaggttgagaaagttgacatgtagatcattgaattcctgaggtatgtgaccagtgagcttgttgttcgaaaggtcaagaatgtttagatccattaacccaagtactgcagggatctctccggaaatctggttgctgctaaggttgagggaggtcagctttgtcaaagattgcatagatggtggaatcaagccggacaacctattcccagcaaggtccagctcggtgagattagcgaaccttgacatgtcatctggtagtgctccagagaactggttgttctccgccatgaagttcttcagggcgatggcggcggatgggagggcaccggagaacatattgttccctatctcaattctagtgatgttgaatgatatctcactcggtagattgccggtgaagttgttgttgtaaatcatgatgttgatgagctttgcgaatgaccatatattctcagggaagtccccgacaaagtggttgttgtatgccatgatgttgttgatggtgtcgcagtccccaaggttcattgggaacacgccggagaagctattgttgaacaccacaaggtcgtagagctttttgttgaagcagagcgtatcaggcaactcaccagacaggttgttgttggacacctcaaaatttcccaattctgaatatttcccaagctcagggggtaagggcccggagagcttattattgaagagccgaatgtcggtaaggtttggaagcatactgacaccttttggaatggatccagtgaggttgttgtagtacaagtatagcagtctcaagttcttcaagtttgcaatgtcctctggtattgatccggtgagcttgttcatggatagatcaagctcctgcatattgagtgttgagatgtaaggaccaatctcgccactgaaattgcttgcaaagaggtacaacatctcgagcttctgaagcttccatatccacttcgggatctttccttgcatcttattctttgacaaatccaatagtatgagctccttcaatgctgacagagcatcagggatgtcaccagtcagattcatccaggataaccacagatatgtcagctttgtaagcttgctaaactcattcggaattggacccggcatgaacgggttggatgccaacgtcagtatctcaagctccacaaggcctccaatggaagcacctggatagctcccattaaagctgttagtgtcaaggaccagtgacttgagcttcaagaacctggcaatagccgagggaacatcaccaataaaataattgcttgacaagttgaggtgctgcatccccaaggacaacttgtcgatgttgctaggaaggcttccggtcaattcattgtttgacaggtcaaggaattgcaaagctgagcaattgtagagcactgtggggaaatcaccggtgaggttgttgtaagagaggtctaagtacttcaggttcttaaggctacaaatagaagctgggattggattggctatttggaagctctggaaggagagggacgtaacctggccatctgtacaagcaactcctacccaatcacagtaaccaaaagaattagaacttctcacctcccatgagctgaatgcagcaggtctaccccaatgccgcttgatggtcagaagcgtttggagctcgccgccgtcatcaagctccgcactggagccggagaagaagaggagcagtagtaacaaaagattatcggtactattggtcattttttgttactagttacgagtggtgatgcttgtttaatgtggacttgtgagactgacttggagagtgagaagctaccaatttcagtacgtatgcagtacgctagtgcagacttgcagctggccgtctctagtctttaccgtgtgtgctggggctatgttggtcaaggtcatcgataatgcaaaaggacagtttgagctcgacatatttttccacataaataattgatatttgataatggtattcaagaatactactcccttcatcctaaaatataagcatttttaaaataatgctaagtcaaacaattttaattttgaccattaatagtgaaaaaaataaaaaagatcattttaaattgatgctactagatttatcattaaacaaaatatcataatatatatatctttttatttaaaacgacttaattttatagatattattggtcagagtagcgtctcaaagattgttttaaggtcaaaaatgcttatattttgggacggtgtgagtaccattttatgatttgcaatctgataatgacataagtttcaggctttcagatgaataaggccctgtttagttcccaaacaaaaacttttcactctatcacattgaatgtttggacgcatacatggattattaaatatagataaaaaactaattacatagattgcgtataaattgcgagacgaatcttttaagcctcattgctccatgatttgacaatgtgatgctacaataaacatttgctaatggtgaattaattaggcttaataatttcgtcatgcagtttacaagcggaatctgtaatatgttttgtaattagtctacgtttattacttcaaatgtgttcccgtatatccgatgtgacacaccaaaacttttcgtctcgcaaactaaacagggcctaagaacctgattctctaaagtagatatttttttgagcgactcgcacgagacgatgcgaagttctattgataaagcagaaaaaaaaattacaagattacattcctagaaggtcgtaaccaggaaaaagagaaaaaatataccaccaccaacacacaggtccgagagaagactagcaccgaaccggttgccgctaagcgtgaccgaccgccgctaggccaacaaaggaacacagacgaaaatgcccaaaaacgcccttacaaccaacacaaagcctaactctatctagagtgtgcttgcaccaatcgttcgagtggtttcgacaaggagatgcctaaacgatgtctccaaggagagaagcgatggaaaaccactgccgccgtccgtcaaggactcaaaagagtcaagactgggctttcgcccggcaaacacccttaagggatgagacggcacgacaacgcccttaggagggggaatgaaccattgttgtcggtccggcaaaggccgggctgggttttcacccgccgctcatcacctgcaagtccatggttgtcgcaccaatgctttaccaccactcaacctctgctgacatgtgggaccactgcaccggtgccccctccagccagccttcgtgtacccaagaccgcgccacacccccggcagctccatatcgcaccgtggttgcctcctttactgccggccgcacctcatcgtgctgcgccggcctccaccaccggacgcgcctctcgcgccagttcggcctcccgccatcggtaacgcctctcgctccaagcgggcctcctcgccgccggccacgcctcttgcgccttactggcctccactgccatcggctgcgcctctctgcaccaagctggcctccgacccctccaatcgctaccacgccggccaggtgcggccgtctgccacacccccggttagctgtccgagactgccatgcctcctccaaccgtagatacggtcaccaccaccgcagccgctgctgccaacggacacctcgccgccgactagccgtagccccctcgccgccgtccagccgcgaccgtcgccacgagctccgcgccgctatcaccaccgtgagtgcaccccgttgccacagccgccggcagccgccgtttccgtcgaccagccaccgtgctgtcgccgccgtccaaccgctgccgccaccatcgccacaagctccacgccgttgccaccgtcaccgtcaccacgaagtctgcgccgttgcgaccgacaccgtcgccgcagctccgccgcgccgctaccgctgcaacctcgccctgcaccagatccgtcctcagggggccggatccgctttcggcgtgaccgagtcctgcccgctgtcgccatcctcgccgccatcttcatccccgccgccgacggatcccctctcttctccttcatcgccaccaccttcatactccaccgccaccactgccaaccgccgccgcctcatcacactaccctgccgccggctgtgtccctgcaagatccgactgcgacggcccggatctgggcggccttcaccatcccgcacggtcccccaccgttggcgagtgagagaaacgaagccctgccgccgccgtccttgcggccgctcgggcggcggcgaggcggaggaggaaagagggggagcggacgatggcggtggtttctgcctcccgtatcgcccgtaagggaggatgacgcgggggccagttaagtactaattcttcaccaaagcacacaataatctgtctaaatcagatattggtggatccgttattgaaacttccgaagaatgtaaatccaaggaacaagcagaaactaaagccgacaaagataagtctaaagactataataatataagtattgcatatcagaatgtgtaacaatttggttgctgaccgagattggctctgtgctcatgagattggtctcctccgcgcccatgtaactctagccgcgcgtatgtgctttggtaaatcacagggggcagttaagtcttcttccctctctaaattcattttttattttcttctaaatctattcctatacaatagggccaaataacaacttcgatttaaaaaaaataagatcaaataagcaaagttaaaaatgtagggtcaaatgtgtatagttatagttagactttaaaatatggacaaaagatcaattgtcccatatctggcactataaacgttattaagaaggaaaatatatcacgtacaaacctgaaagctaccgttggatttaaaaatgaacgtatgagatttatccacgtcatcaatagtaaaatttttactcatgattaaatccgcaagtaaaatttttactctaaataacgtggataaatatcaggtgtccttttattttatccaaggttgttttcaagttttcacgacatgtgattatcacatattttccagaacattaattcatgcatgcatgatgcatccattgatggcatcagcattttatttccaaaacgaacagagtacgatacttaattaatgccttctttattggttgattgatcagcttattatcacacaaacgatatgatgcatcgatcgagatctgatcaaatggccggtggcgatggtaatgggcagttgacctggcaggcctcgagactctggtagcattgcccgtcgctgacctcacaacaccagcagttcttgcagaggtctggtcgctttgcacatagcggcccaggtggtatgttgatcttctctcccaacatgtcaccattgctccggcctattaaatattaattaattaattacaacgtcaaaacaataattaaatcattagcacagacacatatgtatgctatggtgaaaatgatggttaaatggaacttgcacaaagaatatagaaacaaattgctcaaagaatcccttctatattcatgaattttatcttatctttacatgtccttgcgttttttttatctcctttatatctattctattagttgactgttagattttttcaaaatgacttatatgtcatacgtacttatgctttctactttgtaaacataatctaaaaagaattgtgataaaatcaaactggacataattatgaccccaaatatagaaaatagtttttttttacgaatttgatgaaacacatacaaaagattcaccaagaaactgaaaaggcaaagtttttttcagttgggtttaaatttcagtggaaacatttaaaaatatttacaaatattaaatttttggtctgctccatttgtttttttcttttcataaacgaatctttttcaccttgaagctactccctccgtttcatcaggttataagacttttatagcaaacatctatatgaatgtagacaatgctagaaagtcttataatataaaacagaggaagtatgctaattattatttctaaaagagtctaacggttaactcgcagtcgactagctagatgtatataggacggtcatatggtgctttaaggtgtctgggcttcaagggtttagaatgcacggattggaaattggaatccaaaataatcaagaactcagacacgtaaggaacgaaacaaaatttaggggaaaaatttaattgaaaactccgaggaacctaaggaattttctgtatatatattgatcagtattctcgagactaattaaaaagatgtttggactttgatttaagccacccccaaaaccatatacatacgccatcgatcttaattaaggtccacatgcaccagtgctaatccattttggcgttgagttttctgctgcaggtgaatctgcactacactaacacctacatcaacagaggcttttgaaccacgaacaattaatggcatcaacaattctggtcaataatccaccctttgttctaccctattttgcataagatttattaggtgttcatgctaagagatccttttcgaatcattaagttcacctccaccaaaagaaacaaagtcaattaacaatatatgtggagataaactaagggcactcaacgttccatctcatctaatttttatagtgttaaatgcattttcatgtaaaacaaaaaccgaggtatctaaaaagttaatgaggagagatgaaaaaagatgaagaaatcattagtaagaaactacctctacacataaatcaagaatgaaaacaatagataaaaaaaaaggagagataagagaggtgattggatgagagtttatgttgaaccaaccacacccgctgagtatatagttttttttttgaacgacggcaatgcttgccattcattgaataaagcagggagcaatatttacatgtaaggagaaaaggtaatatttacaaagatcgaatagacactaaggcaatatctgcactaggcgtttggctcccgccgtagcccagagtcgataatttctaattaggattgcccttacattgcactgcaggaacagcagcgcatccgatgatcagcagcagcagaaacagcaaccgagaatcgacgttcttcatctccattatttgtggtctgatttttgcagggctcgatgatcttttagagaagaatataatctgcaggctctcgtactggacgagtagatgatctatttatatagaggcctcgtgaatagtgttaattatcgcaatttttttagataatgttaattatcgtaattgatgctggctataaatagataattgtaacccgagccggtatttctgtaattagagacaattgatgccgtttattattagcaaggctgatatataatgctgcctgttgcgtttgctggactgatttctttctgttttctcgacaagttccataagaatatcttgacagcaatggaaagtaggcgtaatgggccaagacagaatgttagccttgggctgttgggccttggggccgaggacgtgttcataccagttaatccgtccatacatttatactataaaattttgattttcacagcattactcacccttaataattttatagaccgataaagctgcaaaatggacacgtcgctaattgttgtctttcgaatcatgtctttactcttgcagtggaagatgctacgacgtactacatccttatgaacaatgcagccctggagcagggattgtaattttagtttcaaaatttccgaaattctggtaatttcggaaagagagaatctattatatgccactgagtttattacagatctatgagttgccactgactttatcacattctacaatatgccaccgatttttgcttaaattctacgatttaccatcgccgtccggttatcctccattagcaccgtacaattttgcccaaatgaccaaaatactcctagaaaaaaacttccgaaatttgaataaaaattctaaaatatcatattataaacataagattgtaaatatccaaaatttggcaaaaacttaaaatccgatatttcaaaatttttgaaagtttctgtcccaggggtattttggtcatttcgataaatttgtacagtactaacggagactaactcagtgaacataaaagttaagcaaaagtcgatggcgatggtaaatcgtagaagttaagcaaaagtcgatgatatattgtaaaacgtaacaaaatcaatggtatatcatagacctgtgataaagtcagtggcatataatggattctctctttcgaaaaccctctcggcaagtcaatatctcggtcgatattttcgggttttctcaatttttttgtgaatttaatcaaaattttagaaaatttcagccaataaaacctaaatttcggttctataaaaatggccgaaattttagccgaaatcaaaattgaaaaccctgtcctagagacacttatcagtcatgttcaaacgacaatagcatcactgtttgcatttatcaaagtagttctggtaggtgttctttttgctaggtactccagtacatacctcacaggggaggctcctgcactcctgcttatagctagctctgttgtttctacctcttaattagctttcatttttttttatgatgagatggattgaaaccagactctacatccatagagcggttgtacagttgtacacagccaattttgctttcatatatggaacatgttatttgagttttgcatacctgtttagggtgtaagcgagtagtcagattatcatcccctaaacatgtgatcatgttaagcaggtaaccccagcaaaatctagatggctttcaataaaaagctaggtctttattacctttattcttaaaagaaaaaaaacatagacgtaggccacgatgcacattagccactcaataccattgcccacacaccatagctcctacaaggctacgacgaataaagtagatggagcttgatatgaatgtgtgtgtgcatctctgcctctctggccttgaactaacatgcaaaatacagagtaacatataaaatactcaggtggttttgtgtttaacaatatgttggaatcaatccagatagttggttcctagaaagatccagcctgacaaggttggcgagcttggacatgtctggaggtagcatgccagagaacaaattatttttcgctaaaaatctatggagtccagttgcagaagatgttggaattgcaccagagaacctattgtttcctatctaaatctacgagatgttggatgatatctaacttggcagagtaccggtgaagttgtttcctccaatcataactatggtaagcatcgcacacgaccatattttctctgggaagtccccaacaaagtggttgttggatgccttgataatgtggatggtgtcgcagtccccgaggctcaccggaaacactccatggcacgtgaatagccgaaggtcggtaagattcggcagcattccaacaccacttgggatttgtccaacgaggttgttgtagtacaagtatagaattttcaagttcttcaagttcacaatatcttctggtattgatccggtgagcttgttgatggacaaatcaagctcctgcaatttgagagctgagatgtcagaaccaatctcaccaatgaaattgtttccggagaggaacaacatctcgagcttctgaagcttccatatccactttgggattttttccttccaacttatttattgatatgtccaatagctcgagctctgtcaatgctgacagaacattagggatgttaccaatcaggttcatccatgatagccacagatatgtcagcttagtcagcttgccaaactcgtttggaattagactagccttgaacggattatatgccaatgttagcatctcaagctccacgagacctccaatggcagcaccctgataggtcccattgaaattgttactgtcaagcaccagcgacttgagcttggaaaaccgaccaatagccgatggcaggtcgccgatgaaagaatttcttgacaggttgaggtgctgcatccccaaggacagcttgtcaacatgttccggaagtttgccagtgaactcattgttggacaggtcaaggaactgcaaagctgagcaactgtagagcgccgtagggaactcaccggtgagattgttgaaagagaggtctaagtacttcaggttcttgaggctacaaatagaagctgggattagattggctatttggaagttgtggaaggagagggatgtaacctggccatttctacaaccaattcctgcccaattacagtgactgaaagaactggagtttctcacttccatgagctgagtgcagcagggctaccccaatctctcttgatggttagaagtgtttggagctcgccgccgtcatcgagctcagcaccggaccccaagaagaagaggagcagtagtaataaaatattactagtattattattggacatttttcgttagcctttacgagtggtgattgcttgtttaatgagtactcagtgaggctgtgacttggagagtgagtgagaatctctcagttgatgatcactaattaatcagtgtacgtatgcagtacgctactgcagacttgaagcttggtgtctagtctttaccgtgtgtttaggggctatattggtcaaggtcttcgataatacacaactacgcaaggacagtacagcttgacagatatttccacttaaataattgatcagtttgtattgatcttctggctgatgctcttcaatgatatcattttacgatttgcaatctgatactgacacaacagactagaaagcacgtccagagggttatactccgacgaacaagaaccaagtgtttgttccagtgatttgcaatttcgaaacgaaatttcgccctccaccgatcaacggcaagcacaaatctcgtctaaaattttcggttgttatccatttttttttcgaatttggttaaagttccttcaaaatcattcaacattcgtcaaattttcaaataatttcggctaagaaatttcttcccccccccacccccacgcgaaaaaaaccaaacttcgagattgcaaaccttgatttgttcgttaggtagatcgataatacccaagcatatattggtgtatccatgaatgaaacttcccaaagaaacgtaaatgtaaagaacaagcagaaactagctagagccgacaaagatagaagataggtctaaagactaagactacaatattagagcctcaccggtggcacatactcccttataagctaaaacgacttattagagaatacaaattaatttatagataaaacttttgtatatttgttcgtagcgactaaaaacctaacgctaaaaagaaattacgttgaaaatattttaaaaccaacttcaaaatcaagtttaaaattttaaattttaacttttgctttgacttattaggctaaccgttggagctcttacaaatataataatatcataatgacagaatgtataacaattcggtcattgaccgactggcgctccgtactcattccatgactcgtgcattgagaaagttcatcgacagattacagatagacttgaaaacttaatacgccggccattttgagatcgttcttcattgtgtacttgatggtgaaataattacgctagcacagtggcaaacggggtagggctatgagtcgcgctatttaattaacctagacgaagtgcggagtcatatactcgctctatcctataatataaaaaaatagaataaatataagacattttctaatactataaatctactagaaaatatctcatcataataggttcttatattttgggcaaagtgagtagtacttacaaatagaaaaaaaatgttatatattaatgactgaaggaagcactacatacaagccatccccactatagttaattatcacatgaattgaaacaactgacatatacggaaccaagcttggtgaggcgacgaagaaccgtcagcatggacggcctctcccgtgggtccatagcggtgcactccacaccgagcttgaacatggccttcatctccttcaagtatcgtgccatatcagggacgatctccttatcaacgacgtccttgctgagatgtcgaccgtaccctctctgcgcccacatagccaagtgcccattatttacgcctggctcgttacccaatcttcccgtgacgagctcagaagcaccacaccaaagctgtacacgtccaccttctcatttacctgcgcggttgcatactctgtagggaaaaaaacatgtcaatatatatgtagtgaattacaaataaatggtaaagtcatgtttagcacaacttcaaatcccaaatccatagtaaattatagtggtttaaaattacaaattttatctaaaataaaaataaaacgatttatctaatgttatcaacgtaatcatgcatggactaaatcaacaaatttatgtagctatgaatatttagctataagaaaccttggattttgagttgtaccagacctaaataatgatttaatcatggtgcctttaattatgtttatgataaagtagaatctatttctgtttttttttaaaaaatatcggaattgatcgtgcattaaagatcacctcacctggagcagtatacccaaaggcctcgctaggaatttctacgttgagtaacggttggttgagcccagcaacattgatccgtgcaagaccgaaaccagctatcttggctttgaggttgccgtcgagcaaaatgttggtcggcttgatgtcgcggtggatgatggggcttttgcaatcgtggtgcaggtagcagattgctctggccacgtcgacggcgatggaccgccgcgcccgccatctcagccgccgccgccgctgcctctcgccggcctccagctgggatcggcggttgccgtgcagccattcgtggaggcagcagccgttctccatgtcctcgtacacgagctggaccgtgccgtcgtcgtcgtcactctggatggaaccccggaggacgacgatgttgtcgtgacggatgatgccgagcatggtctcctccaaccggcactgcaggttcttgatcatcagcagttcagccgatatcacgtcttcgcggccgcagcgacaacaaagattgtcgtcgatcgacgaccaccacgtcctcctcctcctgctgcttttgctgatcactgatcaacctgcagctcatctgtcgacgcatttgctgcgacgatgctgctgatctgaggaataaatcgatggagcagcattgcttccatgttcccgacctcgccacctggccggctgccggcaatggcaccaaccatcccgccacgcagatggcagctgcgctacacaattgtgtgaggaggacggcgccggatacctcgccgccagcaaggctcatactcgccgtcggcttctccggtctgcgctggatgctggcgcagctaacggaaaattttgaataaaatgaatggtcaaacgttgattgaaaaacattctcagagcaaggataataatatagcccacttcctactattagagcacccgcaatggtaaagtaagatgctatctataaaacatgtacatctcagcaatagactagattaatagtaaaccacttcaatggtatgtctacatgggtatctatagctctctaatccattacctcgtttttctctatagactatttccaggttagtagatagctttgctctctttctcttcatttaatctcttccaagtaggaaaatatgctgacatggatctcttgtagagagcctatagataaccattgtgggtgccctaatgtcacgaccggaaataacccaacgggcgttccttacgtgcgtgcattattccttgtcccagaaggcaaggtacaccaaaagttgatacagttcagagtttaacaagcggaagagtaaatagataatttattatatgggcggcgaaggcccagcacacacaaagacgaacggaaaacagcggaagactagggcgacgaccacaggcgcttgacggcaggcacgagctagacaccaaagccttcatcatacaggggctcctcttctgggtttgggaaaaattgagcaagactgagtacaaccaccatactcaacaagacacacccacaagtgcagaataaatgcaagggagtacaagggagtcataatataaagggttagggtttgcagtaaacagcattaaaagacacgtagttgctgaaagctattttgtaaatacgctcctagagctatacaatattattaaataaggccgtgaacccacacgaacctgccttaacccaaggcctacgatgattcagaccgaactggaaacccgaccctgggtcccagctcgtcccaagccaacccaggccaaccattccacattttagttgttatgcaggttttaagaattaaaacactaacttgggtacattgctcggcttgcccataaccgagggcgcggctattcgaatagattatactctgatcagaggtgtacatctttacccacaagacacatcttcctcacgtgtaaccacgtgccacataccaccacggtatacggacggaagacgtgacatagtttccaacccatcctagccacagacaagagtaccgacccaaccccacctacggccgggacctccgggacaggtaggcaggactgagcccctagcagcaggacaccagccctgtgccatgacatctcgactaccgggccgcagctcgtgtagccttcatttgtcctagagatgtccatcgacccccgacttcgtccatctccatccgtgtacttttgtttataaccagactgagccacaatgtcacgaccggaaataacccaacgggcgtaccttacgtgcgtgcattaatccttgtcccaggaggcaaggtacaccaaaagttgatacaattcagagtttaacaagcggaagcgtaaatagttaatttattacatgggcagcgaaggcccagcacacacaaagacaaacgagaaacagcggaagactagggcgacgaccacaggcacttgacggcaggcacgagctagacaccaaagccttcatcctccaggaactcctcttctgggtttgggaaaaattgagcaagactgagtacaaccaccgtactcaacaagacacacccacaagtgcagaataaatgcaagggagtacaaaggagttatactataaagggttagggttgcagtagacagcatttaaagacattagttgctcagggctattttgcaaacacgattctagtactatacaatatttttttatcaaggccgtgaacccacacgaacctgccttaacccaaggcctacgatgattcagaccgaactggcaacccgaccctgggtcccagctcgtcccaagccaacccaggccaaccattccacattttagttgttaagcaggttttaagaattaaaagactaacttgggtacattgctcggcttgcccataaccgagggcgcggctattcgaatagattatactctgatcagaggtgtacatctttacccacaagacacatcttcctcacgtgtaaccacgtgccacataccaccacggtatacagacgaaagacgtgacatagtttccaacccatcctagccatagacaagagtaccgacccaatcccacctacggccggaacccccgggacaggcaggcaggactgagcccctagcagcaggacaccggccctgtgccatgacatctcgactaccgggccgcagctcgtgtagccttcatttgtcctagagatgtccatcgacccccgacttcttccatctccatccgtgtacttttgtttatgactagactgagccacaaactaagccttacccactagacatgtggaagtacggtagtgctttgcaacagaggcccgaagaccggtccttatatggccgaggtgctactgtcaaaaccatgcaccccgagcccagcctaaaaccatttttggggattttgaatagaaggagcggtgtgaagccaattccacaataaccaaaccattccatggtgtccaggtgatatgaatattcccaaagtctagagttgtaaaaccgcctaatgttacctaattaaaagcgaagcatctacctaaaatcatactagtgataccatgagtagagtgtccactagttggggttttgtttattctagggtgaacaaggaaataataacaataacaataataataaggtcataacaaaggtaaataggcatggctaagtaaaacagtgatgacgcgggaatttaaataaagcgataatgcaataagttaaatcaacataattttacaaactgggattcaatatgttcaaagatgatgtgacttgccttgctcgctttcccaaacgtcggcttcaacctccacgaagagcggatcttccgaagctgcagcgtctacacgacaacggaaaagaaacggcttttactctactaaactccatataacaagcagaaacaaagcacaaaaatgggttcttggcttcttaaggaaaaattagagacttgaacggtccaattccgagttcaaatggccaagttatggccatttgaagtttatatgctctttaaatggatatttacgaatttcttcatttaaattttaatttaaaaacatatttattgcgtcagccgggagagaggagcgcgcggaccggttccacgggagtggggcccacgcggcagcctctcggtccacggtggaccgggtgcacgcggcttacgccggccggcgccgtgggtcccacgcgtcagccgcacccgagggcgcgggcggctgacggccgggccccacatggcagccgcggggcgcgcccgaaggcggcctcgccggcacagccgacgggaggcgacgcgcccgcgcccctatggtcgccggcggcggccataggcacggcggagcggcggccgagagaggggagggaagggggaaacgaaatgggcggtccacggctcaccccgggtcgacgacgacgacgggaacggcgaccggagcggaagaaggcggcggcgcggcacgggtcgacggggacggcggcgttccggcggtcggcgggcgaaacggaggggtggacgaggtcggcgaggacgcggcggagccgaaggaggcgacgccgaggcgggagaaggtccgaggcgacgacggcggcggaccggagctcggcggtgacggcggagagagagagcgacggcgcgagcttgattccggcggagagagagagcggcgagtggcggaaacggtggagggaggcacggggagcgtttatatagtgttgggagtgagagagggcggccgggggagaaggaaaccggcgcggcgctctcgggctccatcaatggcgccggcgagatttgcgggggcaaatccgcccgtttgaatgcgagagagagagggaaaaatggggggaaagggagagggaatcacggggaatgattcccctcactttattgcacgcgggggcggcgggatgcggcggaatccgcggcggcggcggcgctagggcacgggcgaggcggcgggagcggcgggaggtaggggatgacgggtgggccctacccgtcagcgagggtggcgggcgggcccgcccgtcagcggcacgcgcgcggggaggaggccgattgggccgcggggggaagaggagagagagggagggaggtgggccgagccggcccaagaggggaagggggggaagaaggactttttagggtttttctttttataaaacctttttaactttgtttatttcttaataattattatttgtgctctgaaaattccactaaaatttatttacgcattttaggcttttaggaaatatacaaaaatcctccaagccttatttgacttttaactttgcacattttaattgttggaggctttcacatggattttacttattctatgcataattttgaggatgtattttagagtcgttttgggacgcgacaaacctaccccccttaaacggaatctcgaccccgagattcggaagaactggcgaagagatgaggatgggctgccttcagctcgtcttcacgctcccaggtagcttcttcttcggcgtggttgctccactggaccttgctaaaacggattacccggttcctggtcctgcgctccatggtgtccaggattttcactggcctctccacgtaggtcaagtcttcgcgaacttcaatttgctctgagtcggcctgctcggatggcactcgaaggcatttcttgagttgcgacacatggaacacatcatgcacgttgcccaaggaggcgggcaactccaattggtaagcgacttcttcgcgtcgggcaacgatacggaaaggacccacataccgaggtgcgagcttcccttttgtctgaaacctgtgtacaccccgcaatggcgtgacccgaagatacacaaaatcgtccactgcgaattccaggttacggcgacggttatctgcataacttttctgccgggactgtgccacctttagattatcccgaatggttctgactttagcttcagcttctctcaagatatcagtcccgaacacttggctttccccaacttgatcccacaaaagcggtgtccggcatttgcgcccatacaacgcttcataaggtgccatttgaggctggcttgatagctgttattgtaggagaactcggcataggggagactcttatcccaggtcttcccgaaatccaggacacatgcgcgaagcatatcttctaggatctgatttagacgctcggtctgcccatctgtctgcgggtggtatgcagtgctgaagtttagtcgggtacccagctcctcttggagcttcttccaaaagtgagaggtgaattggcttcccctatcagatacgattttcttgggaacgccatggagactcacgatcctagcgaagtagagctcggctagtttgttccctccataggtggtcttcacaggaatgaatcgagctaccttggttaatcgatccaccactacccatatagaatcatatccaccttgggtctttggaagtccggtgatgaaatccatcccaatttcatcccatttccattcatgtacttggagaggttggagaagtccgaccggtcgttggtgctctgccttgacacgctggcacacatcacaaagggccacgaactctgcaatttcccgcttcatactaacccaccagtatttctccttcaagtctaagtacatcttcgtactgccagggtggatggaataaggactttcgtgggcttcctgaagtatcagctgtttaagttctctgttatctggaacgcatactcgatttccgttccatagggttccgtgttcatcctctgtgaaaccagcggttttaccctgtttcatattcttgaggagtccatgtatgtccggatcgttcttctgagcctcgcggatttgatcgagtaaggtaggcttggcttccaatgcagccaagaatccgcgaccaactatgcttaggttcagggcttccatctgttgactaagttcgggtggaatgccacggacgttaagagtgttgcaatggctttttcgacttagagcgtcggcgaccacgttggccttaccaggatgacagtgaattcccacatcataatccttgatgagttctaaccatctcctttgccgaagattcaggtccgactgagtgaagatgtatttcaaactcttatgatcagtatatatttcacagcgattcccaatgagatagtgccgccagatttttagagcatgaaccaccgcagctaactccaaatcatgggtagggtagttgccttcatgaggccgtagctggcgtgaggcataggccaccacatgaccatcctgcatgagcacgcaccccaatccttggcgcgaagcgtcacaatacaccatgaaatccttgcgagtatccggcaagattaacactggcgagacaaccagcttttctttgagagttttgaacgccttctcgcattgcgggctccacacaaatttctcttctttcttcaacaactgtgtcatgggtcgagcgattttggagaagttctcgatgaacctccggcagtatcctgccaaacctaagaaactgcggacttgagtgactgtcttgggttgcttccaatcagtgacggcggtcactgtttcggggtccacagcaactcctttagcagatatcacgtgccctaagaatttgacttcggacaaccagaactcacacttgctaagtttggcatacaattgatgttcccgcaactttcccaataccagacggagatggtgctgatggtcttcctcggattgtgagtatatcagaatgtcatcaatgaaaaccacaacaaacttatccaagtattccatgaacactttgttcattaagttcatgaagaaggcaggagcattggttaaaccgaatgacatcaccgtgaattcatacagtccgtatcgcgtggtgaatgcggtcttcggaatatcttcatcacgaatacgtaattggtgatatccggaacgaagatcgatcttggagaatacagtggcacctttaagctgatcgaacagatcatcgatccggggaagagggtacttgtttttgatggtgacttcattgagagctctgtagtcaacgcacatcctcttcgtcttgtctttcttctccacaaaaatcacaggagcaccccagggggaagtactcggacgtatataccccttttctttcaactcttccaactgtttcttgacttcggccagttcatttgctgccatacggtagggtcgcttgtacagaggagtggttcctggagcaagatctatccggaactcaatctctcgtttgggcggcatgccgggtagttctttcggaaacacgtctccgaactctctgacgatggggatttctaacagtcctatctgatggagttctgaactactgacagaggttgggggtgcaaagaaaacaaccggttgttccggccctcggtacagagtgacagtgcgtctcgcacaatccactactccttggaattgagccaaccaattcatcccaaggatcacatccaagttcttggtgtctagcagaatcagatccgagggaaaaggaatcccctgaatttctatggggacggcagggctataatactttgctgtcataacccctccaggggtggtgatgagcagagggttcctaagcctttctacccccaactgatttctccccacgaatggcacagatataaacgagtgggaagctccagagtcgaacagaatggtggcagggatggaatgaatgaggaacgtaccaacgatgacgtctggagttgtcagcacgtcctcggccgtcacgtggttcacccgaccccgaatgacatccttcccaccgttgttggagcggggaggcgcttggccttgctgacgcctcggctttgggcatttatccgcaaagtgcccgggctcgaagcagttgaagcacagacgctgcggaccttgagcgtccttgcggccttgaccaggctgcacagttggtgtaggaggacggggcgcacgagtcccttgttgattctgctgctgctgcggctgtgggacgcgcaccacgaattgaggtcgaggcgcggagcgaggttgctgctgctgttgttgctgctgcgaggaggatccccctgatagggattggtgtagcggaccctttggttagcaccctgttgattgcggaaattcgccaagcggcgcttgtgcgactccagttccttgtgcttggcttccaagcggatgctcttgtccaccagacgttggaaatccggatagtccccagagactagacggacggacagctcagggtccattcctgccaagaacttctcttgcttctcctcatcttcccgcacatcctccggggcgtaacgggccaggttgttgaactcatgcaaatactccgtcacggagcggttgccttgcttcaactctcggaattctcttttcttaagggccacgactccggcgggcacatgggttctccggaaagcggcggtgaaacgggcccaagtaataggttgcccctctggctgcgtagcctggaaatggtcccaccatagagatgcgggcccctgcagctggtgggcggcgaagataactttctcctcatcgctgcactgcacagtgtctagctttttccccacggcatgcaaccaatccaacgcatccacggggttgttggagctagagaaggtaggtgggcggatgcggaggaactcggcgagtttagagtgttggggaggtggtggtggagcattatgttgtggcggattttggaggtggtggaggaaagcagtcatcatgttggcctgctgggcgaggatttgggtgagaatggcgttggtgtctggtggtggtggtggaggcggaggaggaggtggaggtgggctgccctggtggtggtggttgctgccttcaggttggttgccatcaccggtggcagcacttctcctggtcgtcaccatctggaaaccccacacagaaccagcaaacagagagagctgacaattaaagctaaccatccacgactaccataattcttgaatttattactgctattaaattggttcattaaagttcaagttgcttaggcaaataaaataaagacaggctccgacacagttataccacacaccggcataaccatgccccacacaactccaacaagaagacaaacgagaaagaacacacgcgcaagcctactaactgctcatctaccgctgcgacgggccaggacggaaggtgagcaacagcgcatcctccgtgctaccaacgccggaggcttccccctcctggggaaccacgggcgcaggcttggcacgaggggtctcgacgaagcaagtccacgccagggactgacgaacaagctcgggcctggaggtgctcttgcgggcggtgatcttctggctgcggcagacgcggcgacgcttggggcggcagacctctccctgagcgatcttgagctgatgcagctgcgcctccaccgcgtctaggtccttcttgagctgcaggttctcttgacgcagctccaggatcttcatgttgttctcggccatcccacggcgcaccatctgatggaagtcgatacgagccgcgtcgtacgcctccaccatgcgcgccaggtgcaggatggtcgcgtcatcctccgagctagcatcccggaaggtggcgtagtcgcgggctcctccgcggcgagggtggtagcggtagggcgagtgctgcaactcgtccgggtagtgctggtgaagagtgccgatggcgaggagagcggcgctctggcaagcggcggggaaagaatctccacccgcggtgacggccagcgaagtccgctcgggagagccagcgaggatcactgcagtgacctcccaagcagcgtggggctctgcatcgtcaccctcctgctccggaagcggcctgccctggtagtccactccatgtggataccccaggacaacgcacatgcctcgcagctccaagacgaaaccagtcatgtccaaaccacgacgggtgacgttgccggccatctacaaacaaaaagaaaagcaacatttaaaaagggcagattttggcgataaatgaagcagcaagacagagaaagactagagggttttcacaaataacagaggatttttatttcgaaaatactgctaaggcttgggatctacggctcgtcctagggtcaagggggttctgataccaacttgtcacgaccggaaataacccaacgggcgttccttacgtgcgtgcattaatccttgtcccaggaggcaaggtacaccaaaagttgatacaattcagagtttaacaagcggaagcgtaaatagttaatttattacatgggcagcgaaggcccagcacacacaaagacatacgagaaacagcggaagactagggcgacgaccacaggcacttgacggcaggcacgagctagacaccaaagccttcatcctccaggaactcctcttctgggtttgggaaaaattgagcaagactgagtacaaccaccgtactcaacaagacacacccacaagtgcagaataaatgcaagggagtacaaaggagttatactataaagggttagggttgcagtagacagcatttaaagacattagttgcttagggctattttgcaaacacgattctagtactatacaatatttttttatcaaggccgtgaacccacacgaacctgccttaacccaacgcctacgatgattcagaccgaactggcaacccgaccctgggtcccagctcgtcccaagccaacccaggccaaccattccacattttagttgttaagcaggttttaagaattaaaacactaacttgggtacattgctcggcttgcccataaccgagggcgcggctattcgaatagattatactctgatcagaggtgtacatctttacccacaagacacatcttcctcacgtgtaaccacgtgccacataccagcacggtatacagacgaaagacgtgacatagtttccaacccatcctagccatagacaagagtaccgacccaatcccacctacggccggaacccccgggacaggcaggcaggactgagcccctagcagcaggacaccggccctgtgccatgacatctcaactaccgggccgcagctcgtgtagccttcatttgtcctagagatgtccatcgacccccgacttcttccatctccatccgtgtacttttgtttatgactagactgagccacaaactaagccttacccactagacatgtggaagtacggtagtgctttgcaacagaggcccgaagaccggtccttatatggccgaggtgctactgtcaaaaccatgcaccccgagcccagcctaaaaccatttttggggattttgaatagaaggagcggtgtgaagccaattccacaataaccaaaccattccatggtgtccaggtgatatgaatattcccaaagtctagagttgtaaaaccgcctaatgttacctaattaaaagcgaagcatctacctaaaatcatactagtgataccatgagtagagtgtccactagttggggttttgtttattctagggtgaacaaggaaataataacaataacaataataataaggtcataacaaaggtaaataggcatggctaagtaaaacagtgatgacgcgggaatttaaataaagcgataatgcaataagttaaatcaacataattttacaaactgggattcaatatgttcaaagatgatgtgacttgccttgctcgctttcccaaacgtcggcttcaacctccacgaagagcggatcttccgaagctgcagcgtctacacgacaacggaaaagaaacggcttttactctactaaactccatataacaagcagaaacaaagcacaaaaatgggttcttggcttcttaaggaaaaattagagacttgatcggtccaattccgagttcaaatggccaagttatggccatttgaagtttatatgctctttaaatggatatttacgaatttcttcatttaaattttaatttaaaaacatatttattgcgtcagccgggagagaggagcgcgcggaccggttccacgggagtggggcccacgcggcagcctctcggtccacggtggaccgggtgcacgcggcttacgccggccggcgccgtgggtcccacgcgtcagccgcacccgagggcgcgggcggctgacggccgggccccacatggcagccgcggggcgcgcccgaaggcggcctcgccggcacagccgacgggaggcgacgcgcccgcgcccctatggtcgccggcggcggccataggcacggcggagcggcggccgagagaggggagggaagggggaaacgaaatgggcggtccacggctcaccccgggtcgacgacgacgacgggaacggcgaccggagcggaagaaggcggcggcgcggcacgggtcgacggggacggcggcgttccggcggtcggcgggcgaaacggaggggtggacgaggtcggcgaggacgcggcggagccgaaggaggcgacgccgaggcgggagaaggtccgaggcgacgacggcggcggaccggagctcggcggtgacggcggagagagagagcgacggcgcgagctcgattccggcggacagagagagcggcgagtggcggaaacggtggagggaggcacggggagcgtttatatagtgttgggagtgagagagggcggccgggggagaaggaaaccggcgcggcgctctcgggctccatcaatggcgccggcgagatttgcgggggcaaatccgcccgtttgaacgcgagagagagagggaaaaatggggggaaagggagagggaatcacggggaatgattcccctcactttattgcacgcgggggcggcgggatgcggcggaatccgcggcggcggcggcgctagggcacgggcgaggcggcgggagcggcgggaggtaggggatgacgggtgggccccacccgtcagcgagggtggcgggcgggcccgcccgtcagcggcacgcgcgcggggaggaggccgattgggccgcggggggaagaggagagagagggagggaggtgggccgagccggcccaagaggggaaggggggaaaaaggactttttagggtttttctttttataaaacctttttaactttgtttatttcttaataattattatttgtgctctgaaaattccactaaaatttatttacgcattttaggcttttaggaaatatacaaaaatcctccaaaccttatttgacttttaactttgcacattttaattgttggaggctttcacatggattttacttattctatgcataattttgaggatgtattttagagtcgttttgggacgcgacacacaaactaagccttacccactagacatgtggaagtacggtagtgctttgcaacagaggcccgatgaccggtccttatatggccgaggtgctactgtcaaaaccatgcaccccgagcccagcctaaaaccattttgagggttttgaatagagggggaggtgtgaatccaattccacaataatccaaccattccatagtgtccaggtgatatgaatattcccaaagtctagagttgtaaaaccacctaatgttgcataattaaccagcgaagcatctacctaaaatcatactagtggtaccatgagtagagtgtccactagttggtgttttgtttattctagggtgaacaaggtaataataacaataacaataataataaggtcataacaaaggtaaataggcatggctaaataaaacagtgataacgcgggaatttaaacaaagcggtaatgcaataatttaaatcaaaataattttataaactgggattcaatatgttcaaggatgatgtgacttgccttgctcgctttcccaaacgtcggcttcaacttccacgaagagcggatcttccgaagctgcagcgtctacacgaccaacggaaaagaaaaggcttttactctaataaactccatataacaagcagaaacaaagcacaaaaatgggttcttgacttcttaaggaaaaattagagacttgaacggtccaattccgagttcaaatggccaagttatggctatttgaagtttatatgctctttaaatgaatatttgcgaatttcttcatttaaattttaatttaaaaagggtttattgcgtgagccgaggggagggggcgcgcggaccgggtccacgggagtggggcccacgcggcagcctcacggtccacggtggaccgggcgcacccgggctcgcaccggccagcgccgtgggtcccacgcgtcagccgcacctaagggcgtgggcggctgacggccgggccccacgcagcagccactcggcacgcccgagggcagccaagccggcgcagccggcgggaggcggcgcccgcgcccctaacctatactaaagtcaacacatataatagattagctataaggttacctataattttcttcttctatctctatctctcactcatacatttaatctatttgtcttggagcttgtgttaagttagctcttgcatgagagccaacaccattctcttttgtttatctctttcctccacataagcttatagtaagcttatagatcactattatacttgctctcatcctcgcgtgcatatgctattaattcctagtatgatgggattggattttaatttttctcatggctaattattctttcggttatagacagtatatacgggtgacaacaagacgtccctgacgactttgacaatctcaagatatatctgccaagtgtctcagaggtgcttacagaggtagtgaagcggccgcggaggccaagacgacgaggacgacggcaataagggggtgccatttccgcccctgattatcggctccgctttgatcaattggcagaaaattcatcgatatgatgatgatgtgctggatcgagtagtgtacgtgcttcgatcgtcagggctgtatatatgccttgtatttatacacataaattagtaacgcgtgagatatatttttatacaactaggtgtctatatgtgtatggttcagtgaacaaatggagtgaagttttgtcaggaagcatcgatgtctattctccgtgatttcaggcgctggtgcatgacacattgacaccaattatttatatgtactccgtatataccggagtaggaattaagtggttcaaggtgtgctgcatatataaagaacgtagtatagatgctgtgagtattactatctttttgtgtggtcctggcgcacagaaagtataaaaaaacaatagggcggtaaaccgatattcaatatctattggtcactttggcttgctagtaatgatgtagtcttaaatggctcaagtattaactctctcttgcaggttattttcagggtaacgcatcgggctcgccagtggtctttgcttcttaaagaaggtgatgagaaagctttaaagattgggtgcctaaaattgaaagttatcattatggaattctactcaaaatctaggtggaattgaagaggaagattgaattgtgttagataaaatcttttgttgtgagacttgttctggatgtctttgtcgtccattcgcctcctacggcatcgtttgcttttgaacctgtttgtaagcctaagtgcttgatgatgtaatactatggttgtgtacatccttcaggatatagaggccaggttttatttaatccattatctaaaaaaataaaacgggttacaaaatcaatatagtggtagctaaacacgaaagaatgccatagaatatccaaacttgatacgatattaaggcataatattttataagagagttagcctatatctttagggcactaattacggatgctcatccctacgacaatagcattactgatcttcaaatgacaatagcatcactattcatgaaactataatagcccatcctctacatccacagagtggatgtgctcatgtgcatagccaatttagctttcatatatcggacatgttagttgaattttacctacctagctagggtgtaaccgtgtagctagattatcatcccctaaatatatggtgctatcatgttcagctggtaaacgcagcaaaatgcaaaatctggatggctttcaatttagggttactttgatccatgccattgcaaatttggctattcagaaaaatatcattacaattcgtctattcgtaactgtgccactggaattttacaaaaatagaaccgcgtcacggcagtggcggctccttctttctcgcatttcttccgagagccaagctggcaagctcagagtagtcagcagcgagacccaagcacgcgagatctcgcgcgggagcggtagcggcgatgccaccggcggtcgtccatccatccatggccgccgcgagcttcgacagcttcggtggtggagcaagcgtcggtggatctggcacggcatggcgcgagcaggcctgacggtggcgacgaagacttaaagacggtggagaggtgtcctgccgcttgcggcgctcgcggcaggcggcgaggaggcatttggagaggcctgcggacgaggagagcagggagaacaccgccgtgagggacagcggccggcgtgaggtgctcaccgacctggaggccaaagcgggagccgaggtcgagcagcgatggggaagaagagggtcacgccgccggtcactctcgacgcgcagcctaggcttccgccggttccgcccgacgccactatcgtccgacaccgccaccaccggattcgtcggtcgtgcccaccgctggatttgccagtcgcgcctgatagagcgagctatgggaggtggctcggctgagggagtcccatgaagagctgcgggagcgtgtcgagctgcttgaccgcaccctgcaggagaccaacgccaggatccgcgccacgctctaggttgggttcgttcaccttgccagcaagctccctctccggcttgactccgggaagatgatgggagaaggaaggaagaagacggaaaaggaagagaatggatggaaaatgtgacggcagtggcacggttttaattttgtaaaattccagtggcatggttatgaataggcgaattataatagtatttttctgaatagccaaatttacagtagcatagatcaaattgacccttcaatttaaagctatgtctttataacctttattattaaaatgaaaaaaaaaacaaagatgtgggctaacggtagggctgtcaacgagacgagctcgaatgagctcagaatgtgctaataagactcagggctttgttcactttactaccacttgtagcactattaatttttggtgttaccaaattttggtaggcagtaaacttgcaatgctttttacaggagatatttaactatttgctactcttacaagtgacaattaagaattcatcactggactcacatgttatatatagatgaaaactcacgtgtcataaattgtgagtggcaaattttaagtttgacagtaggtgatgtggaattgcgattatacataatacataaggtgttatatatatgtgctaaatatgtgaaggatttaatggctagctataatttgtttaagtagaaaccatctttcgtcggtcggccgatttccacaatagtcccggatgcaataaaaaccggggctaaagatgatctttagtcccggttcaaaagggtaacgggcatatttgatctttagtcccggtttgtgttaccaaccgggactaaagatcatctttagtcccggttcgaatgctgtcaggacctgtcaggcccccccgggatctttagtcccggttggtagcaccaaccgggactaaagatcttaactaccaaccgggactaaagatcccggtgtcccggttggtaataccaaccgggactaaagatcccggtgatctttagccccggttggtgctaccaaccgagactaaagatcttaactttagtcccggttggtaataccaaccgggactaatgatcccggtgatctttagccccggttggtgctaccaaccgggactaaagtcccacccctatatatatgtcttcttcctcctccagctgcccgagcaagcttcaaaatttcttcaaaaaagaggggaggtcatgccaaaatttctattgaatttattttggtgattacatacaaatcggaggtgcctaaaaggtttgcaacttcatcctccaatgtttttttttgtcatactacatttgcacctatgttttgcacactttttttgtctccaaaatttagttgtaagttgatgagagagaaaatgtgtgtggggaagaaagaatatatagaaatttagttcatttgctaaacaaggttttataaaatagttgagaaggaaaactctagtgaaagttaatattaaataatagaaaacaaactaaaataaaaattaaaagaagtaaaacacattaaaattagtttaaaactttacaaatagtttttaagaattatttggtgtaatattttatgatttttgtatgaataaagatatcttataattattgtatgactgtcattattgtaagaataattatttgtgtgcggtttttttgactcatgtagatggatcggcaatggatgtacgctgatcggcggtccaaagagtttattgacggcgtgcactattttttgagagtggccgaagctaacaggcaaaggggttttatttgttgtccatgcaataagtgtaagaatcagaaggagtattctgcatccaggactattcatttccacttgtttgagtcggggttcatgccaagctataattgttggacatcccacggagagcaaggtgttgaaatggaagaagatgaagtggaagacgacaatattccggactttgctcagtatgttggatttgaaggaaatcaaacgggcgaggaggaaatagctgctgatggtaacgacgttgcggatgatcttggtcagatgttgcaggatgccagggaagactgcgaaagtgaaaaggaggcccataaattggacaagatgttggaggaccacagaacttcgttgtacccaggttgcgagcaggggcacaaaaagttggataccactctggagttgttgcaatggaaggcaaaaaatggggttagtgacaaggcatttggcgatttattgaaactcgtcaagaacattcttccggggggaaacaaattgcccgagacaacgtacgaggctaagaagatagtctgcccgttaggactggaagttcataagattcacgcatgtccgaacgattgtatcctatatcgcggtgaggagtatgagaacctagaagcatgccctgtttgcaaagcactacgatacaagattagacgggacgatccaggagaagttgacgggcagctaacaaagaagagaattcctgctaaggtgatgtggtattttcctataataccacggctaaggcgtttgttcaggaacaaggggaatgctagaatgttgcgatggcacgctgaagagcgtcaacaggacgggatgctgagacaccccgccgatggttcgcagtggcgaaacatcgacagaaaatttaaagaatttggaaaggacgcacgaaacatacggtttggtttgagtacggatggcatgaatccttttggagagatgagcagcggccatagcacttggcccgttatgatgtgtatctacaacctccccccctggctatgcatgaagaggaagtacataatgatgccgattattattcaaggccccaagcaaccttgtaacgacatcgacgtgtacctaagaccactggtcgaagatcttaaacagttgtggaagaaggaaggtgtccccgtgtgggacgaggacaaacaggaggagtttaacctacgagcgctgctgttcgtaaccatcaacgattggcctgcacttagcaacctatccggacagtccaacaaggggtacaaggcttgcactcactgtatggatgaaacagaaagtacgtatcttaagcattgtaggaaggttgtatacatgggtcatcgtcgattccttgcagcaaaccacccggtacggaagaaaggcaagcacttcgaacataaggccgaccaccgtacgaatcctaaacatcgcagcgggaaaacagtgtttgctatggttaaagatcttaaagtagtgttcggaaaggggcctggaagccagcatatagagagcgaagatggtcacgcggcgatgtggaaaaagaactctatattttgggagttaccatattgggaattcttggacgtacgccacgcaatcgacgtgatgcacctcactaagaacctttgcgtaaaccttcttggcttcctaggtgtatacggaaagtcgaaagatacactggaagcacgtaatgatctgaagcatatggaacaacgcggcgaccttcacccggaaccaaaggagaaaggaagccattacttgagtccagccagctacactcttagcaaggcagagaaggaaagtatgtttgaatgcttggagagcataaaggtaccgtctggatactccacgaatatcaagcgaataataagcacgaaggagaagaagttcataaacctaaagtctcatgactgtcacgtgttgatgacacaactgctaccagttgtaataaggggtatccttccagacaatgtcgatactggattcatcgaccctcggaaagtaaacgtcgcaatgctcgaccaatatccacaagaaacagaggacaatctcgtccatctcctgaaggcgcagcattacaagacgttcatactgttgccatacaacacagagttagtttaattttactgtcttcctacataccaaatttcattcccgtacgaacttgctaagtgtttcatatgtaatgcatcccacgcacattgcagattccactgggtgcttttactcatcgacctggaggcctgcaccgtcaacgtatatgactcaatggataaaaaagagtctacgtttgacaaggttttcgaacttgtagacaggtaccgtcataagttcctttgttaattaagaaaatcttgttatgttaattgctactacgaatcatagctttaaactccatgtagggcttggtatcggttccgtcatttggtccgcggcaaatggagagaaagacttaggcggaagttcaaatttcctgtgagtacacatgctctacatttatatttctccgattcaaatacatacaagtgtatattaattagatctctcgttgtttgtcatttatttgtagtgcgcaaagcaaaagcagggaactaacttgtgcggctattacgtgtgcgagtattgccactgccttacagaccaaatcatcaccacaagagagctcgatgtacgtacaaataaattcaaaatttcattacgtagcgatttcttgtttaattactaatcaatttcatacattcatatagtttattcgcatgagggataacctgaccacacacaaggaatttatcgcggcggttcaagaacaactcatgggattcatcaacgaagaaatccttgatcccaagggtgaattctactacgacggaaacacaattcaccggtccttagcttctgagctagcagcgagtactactacgtcgaaatcgtagctagctaggacatataatggattgtaattaatacatgactacatatgtttctatatgcatgtgtacacattttctataatgtaaatatattttgttcatatatatatctatatacaaatgcatttgcataacatatatatgcatggtttatatatatatatatatatatatatatatatatataaaccatgcagcaacaggggcatgcaaaaaaaaaaaaggtcagctctatctttagtcccggttggtgttaccaaccgggactaaagatcgatctttactcccggttatttcacccgggactaaagatagcgatctttagtcccggattggtactcccggtttggaaaccgggactaaaggggggttacgaaccgggactacaaagggtttctccaccagtgtatgcaatggtgttaaatatggtgatggcctaacttctttatagcgataatattctacactaattgaatcactaatgttgacttatatactaattaacgaggaatagtaactactaaatgaatgattgtgaatttgtgattaagtatgaaaatgatcaaatgacttttctttctaaatgatgcggctcaatacatattgagctattggatacaactatataggatatgtagatatagataaactagatgatgctctacgctttgctgcagaatatatgttagatattgcaaaaatgatgaaatgatttggattgaaatattatgaaaatgatttgagattgataatttagcatatgtatgtttagttttagaatgacataaaatgtaaattttttttgaacaactcgcaaaagacggtgcaaagtttattgatagagcagaaaaaaaattacaagattacaaccctggaaagtcgtaaccaggaaaagaaaaaaagtataccaccacccacacaccggcaacgccaacacacaggtccaggagaaggctagcaccgaaccggccgccgctaagcatgaccgaccgccgctaggccaacaacaaaacacagccgagatcgcccaaaacccaacccttacaatcaacacaaaccccgctctatccaagtcttcagaagttagagagagagggtgagagagaagaatgaaacacttctccccttaggccctctgatgtgaccaacttatagtgtctaggacgccgccataagaggatgaaatctagagcgagcttgcatcaattgcttgggggtttccgctaggggatgtctaaacgacgttttcaagaagagaagcgatggaaaacaccgccgcccccatccgtcaaggtctcaaagagaaccgagacagggctttcgctcggcatccacacttgagggatgagacgtcacgataacgtcctcaggaggggaatgacgcgtcgaacgtcatcgttgccggcctggtcgagactgggctgggttttcacccgccaatcaccacctgcgagtccacagctggcgctccgatgctccaccaccatcaaacttctgctggcacgtggaaccactgcatcagcgccccctgccggccagccttcgtgcgtcgtagaccgcaccgcacccaccggcagctcctccttgtcgcaccgtgcccgcctcctccaccaccagcagcacctcgccgtgtcgtaacaggcctacggcaccgccggccacgcctcaccgtgctaagccgacctccaccgccactggtcgcgccacctcgcgccgtgccggcctccgctacccccggcctccatagccgcggacgccacaagttgaccgttgtctgccactaccgccgtcactagccgccgtcgctagccgctgccgccgccatcacagccactgcttcgtcgccatccgccaccacagcagtcaacaccgccgccgccagctgctgctgaccgccattcggcaatcgccatccagatcaggccgagttggggcggatctgggggcctccgccgccgtcgccgccaaaccccgcaccgccacgtccactaccaggtgccgccgtcgccacgttcactccccgccgccagagacccctccgcaagatccgaccgcgcccggcccggatatggacaccgccgccgccgccgctccgaggagcgcccctggccgccgagcgcgtggagggtgagagaaggccccgccgccgctgtccttgcggccgcacggctttgccagtgcccgctcaggcggtggcgaggcgggggaggaggagggagaaggaggaaggcggcggcggcgtcgcctcccaagtcacccggggaaaggtgacgcgagaggaggaagagtttccgattggttgagaggaagtgactgaagcagactaaaatgtaaatataactaatatatacttacatattgggttttgtgtgattaattaatgggttgatgtgacatgcttgcatgtaagttttaggagtgctaataaatattatacttgtatgttaagttttatgtgtttaataggtattagctttatagaaagaagagattggatatgccctcagagctcatagatgaccgaagacttgggctaatggtcttaacatgtgcacatctttgtaggaaagagccaaacactcgagactgcaaagtaagtggtcaaggtcttcgacaacgaaagctaatctttaattgagactagggccacatgtcttttggttcttaagaaatcaaatggaatcttttttccggtggatcctcagttccaaagagtacaacggctggactgtttttatgtggaaaatgctctgatattactgtatttttaaataatagataggaatttagcatatacaacattcacaagtggatatacataaccaaagattacacgagtacatactttcctaatctcataactgacataaataacaaacaagcgaaaaggaaatacttaaaaggctgggattaaagcttttcttgcttgcttcaaaacttaagataaaacggagctaagcgctcctaaccactgccacagtgccacgccttctcactccttgcagccaccacataagctcctctgttctgctagaaggggaaggaagggacataaccaatccagccagccgccatcgccgagcaccaatcaagcgttgcccggacaacctacacctctactccctccgtctcaaaaacacttaatttctgggtttctgtttttattgtttgaccgtccgtcttatttaaaaaaatttaaaaagataagttatgtataaagtattattcatattttactatctaacaataataaaaatactaatcataaaaaaatttcatatagaacagacggtcaaacattgtacacacacttaagaattaagttttttttatacaaagggagtacagcgctaacgagtacgtcaacgtcatgtcatagcagagcaccacacatcgagctgttgtaatttatctcgtaaaaagtgatcgttgatgcgctttgatattactcgtgaatatggctgtgtttagatcaaagtttacatccaaacttcagttctttttcatcacatcaatctatcatatacacgcaacttttcagtcacgtcacctttaattttaactaaaattcaaactttgcgctgaagtaaacacagcctatattgaacttattttcagattggaagaaatagacaattagacacacaggcctcttatatatctataaaattcatcttattaagtataggtaatattatttctctattctctcattaagccatatcatctcaattatttctaactcttggatgtttgatatatcgtccaaattatatcatttcctttttttatcttataaaatcatatcaacttagttttgtttttggataattgatttatatacctttttctctttctctcattgagtctcatcatcttagtcttttcttctaaacaattaatccatatatatttaaatgggtgaatagctaatttaatccctcaagtttcaccgaaggtcaattaggtccttcaggtttcattttgtccacgtaggtcctataagtatttgttttggcttaaaatcattcttaggcccacttaatatgccatatggctatttctagtcaatatttctgttagaaaatatcctttttgccaataatttgtatataactatacactagaaaagagaaaaccaagatgaataaataacattgcagaaatacttcccattattttaacatgtgcacatcaaacttaagcaatgtctatcgtatacacttgcaagtacataattattttcgttctacataaattacgatgcattatctataaaaaaattcattgcattcgattttttttctcttatatatgtgaatgagggggttaaagtgtcatttatcaagagagttgttagttatgtttggccatgtggcttctaagtgggttcaaggataaatttgaactaaaataaaaacttgaaggactaatatgtatatattgaaacatcaaggactaatttgagcctccgatgacactttggctattcacgctatttaaattgttataaaccacatcatcaaatggtttataattagccttttttttcaatagtcgaccagagatgaaaattagataaagtccatcaccggtccctaaacttgtaccgctgtatcatcccggtccctaaactcacaaatcgaccgttcaggtcctcaaactggttcgactgtgtcatcccggtccctaaacttgcagatcactcgtttaggtcctccaacttgttcggttgtgtaaccccggtccctaaacaggacggtctaaaaactttatatcaaaaaataattaataactttttcatatcaactctaatgaagacaaactttatatcaaaattgtagccctcgacgcaactacaactttgtagttgaaaagcttttgaattaaaactgtttagggtcccaaaatattgttgcatgtttatagattttgaaattttaattttaaaattacattttgggacaaaaatgacttaaaataaaaaaaatcaactacaaagttatagatcgcgtcgagggctacaaatttgatataaagtttgtcttcattagagttcacacaaaaaagttatgaattatttttaaatataaagtctttacactgtcctatttgacccagatgatattcaaatccaagtttagggaccgaggtgacacaactgaacaagttggaggacctaaacgagtgatcagcaagtttagggaccgggatgacacagtcgaacaagtttgaggacctggacggtcgatttgtgagtttagggaccgggatgacacagtggtacaagtttagggaccgatgatggactttactcctaatattatataaaactctaacagcaaggcatggggtttcatgtgaatttttttgagaattaatattatttttatggaaaatcgcaaaagtagtggccaaccggggaaaatcgcgaatttgggaccatgtcgaacggctgtagttcgatagggtagatatcgaagagccggagcgcgactggaaaggagatcgaacggctgcagttcgacagggcctgtcgaatagcccctgttcgataggctggggtgtcgaactcccgcagttcgacatattattaaaataataataagttatttattttaataatatgtaatttcgcaaattatttttaataataagttatttatttaataatatgtaagaaaggataatatttttgtaatgttttatgtatatggtttagggttttgataatgtttggtggggaattgtactatttatttgttggttaaaatacttggattacttagtttcattgattgtataattttttggtttaatggctttgtcgcaatttagtaagtaaggacggataaagaagaggaggggattgaatacattgcagcggatgcagaaatgagcttaatagatggaaaagagaatgaaacattagctaacaaatagataaacctaatccattcatgacccatacaacaacataacataacaaaatgccgaaatagagcgattcagggttaagcttctctgttgaccccttctacgtcattgtgtacgtaatgcaacttcatgatccttcaatctcttatactctgtttgcgtttcagcttcagttactcttccgctttcatacgtcgggttgaccatgtcgatccatgaagtaaaagcacacatccttggattcccctgaacaatcaatcaaattagataatgggaaataattgttgtgggagcgcgaagcaaaatgtaaattagtaattaagcatgtgacatacaacgaagttgtcatctatgttgggacagacgaagtaccacctgccatatgtatcttgtgagaaggacgttgcaacctggcagcgttctctacaaccgcatttgggacgatcagaccatttaggtatacctaatggatttgatctccagtttaagctagcggactgaacatggcgctcgtactccatccatgcttgaatgaattgtgtggtcgtctcaggttgagttatcatcgatccgatggaagttcttcgcaccgtatcgatccagtttacgtaactacatttgcggtcttcttcctgtgcccagaaattaatgaccgtacatggatgtatgtaggtatatgacagaagtaatcatagtgagtaaaaattagtgcaacttacgatgaaatcatcgtcgacaatgttaggacacacgaagcatctctgtcctagagttcgttgtcgaacggaccttatgacctggcaacggtctccacacctacactctggatgctcccgccaattggggagtcccagtggattcacttgccatggtaaggattcggcagtttttcgtcgttcgtattcatccttcctccttaggtagtccgataatggttcgctgcatggatataggcgtgccctgtcacgttgtggattagtcgtatcaacccactcaacgaagtcgcacaaactacggtaagactgaaaatttttgttttgccctccaagccttgtcgtacgatatctcatatccgtactctttatttacgtcatgcattattgtgaaaggggacaaagatgtttttctaaccacctttgaatataccatttgtgccacaaatgccgctgtcatgttcctgtgcaccagacgggtattctccaacaaacatgtatgttgctcaaccctcgaagctacccataaagtgtcatgttgtggcttgtaaccatgcactctccaaggacatccaccctgtgtgcacttcacgtcatacgtcgtcctatttgaaaccttcaccttgaattcacgcttctggtcaaatgcccacctcttcaccgcatcttgtaagtgacctttgtcatgaaacatctgtccaactttcacctgcttactatcataacaccagtgggcatctaaatcatcgtttaccttcatatgactcattgatatggtcgtccaatcatcgggtatgttagtttcgttgtcccacagtgttgtatcttctccttccactacaagcgcaatgtattcctcgttttccacttccatctaatccactaccgcctcattctcctccgctgaatcaacacgcataggcgaatccggttcttcatcgtctgagtcattggcctcacgattagtaccacgaacaatgacctctccttgtgtattaccctctattacttcttcccctcgaccttgctcagtccgccaaacattttcaacttgtccaccttccaacggagtttcttccaccacggtatgacttgactcccccgatcgatcaacacatgttttcttctacaccactattgccaggctatagcctttctcccttactttactaacaaacttcctccaactcccggttgacgcaacctccactactctccactgccatccatgttgacccctcactggccacacggcatttatgacaaatttatcatgcactggatctaccccaaacatattatacaaccaccctaacacgtcgttcaaacccatatactccggtgcattcagactagtatcatggaaggcatatacagtcaaatccaccccactatcgcatatttgtataggagcatcgccataatacagacgaatgggcatatcacctgacatcctgataaaacatgacaaattgtctgacgttaatcatttaatccttcgataattaccctattacaacttatactacattgccgtgtactaacttacaactattagtaacaaatgactagtttaataatcgaaataaaatataatatctttgtacattttttaacacagaacatattaataacatgtactaactaagaactaatttaaccatacaaatacttacatacctctactaacatttaacaatgacaaatacgtgcaaacaataaatactagcattgaacaatgcgaaacaattaacaaatcacaaaccaattttttattaaactttcttatgcctcatacttagggattactaatgtataccttaacttcactggtggaggggttgccaaccctctcctcccagccggcgcctcctcggcctccactccggcctgctagctcctcccctcactccctccggcgcccacggcgatgaagtggcgactcggcggcggctggcgatgtggtcctcagaaaaatcgaagcagcatcgcgggctgggcgcacagggttttaaaccggcctgtcaaacgtccattgttcaacagggtcggttgcggggcctatcgatcgcccgctgttcgacaggccgcgcggcgctgggtggtgggccctgtcgaactccctccgttcgacaggtcggcttgtcgaacgccagcggttcgacaggtcccagtcgaatccccaacgttcgatatctaccctatcgaactacagccgttcgacatggacctaaattcgcgattttccccgattggccactacttttgcaattttccataaaaataatattaattctcaaaaaaattcgtttcatgaagtataggtaatggatgggtctgaactctgatttcccttaagcaaacaattgtgcctggtcatgttccaagaaatgcaacgacgaaaaagacaacaattattaggatttttacaaagtacaaaattgcagaaaatttatgaaaacggtatgataaattgtttgcttatacagtagtgggacctgccctggcacagttgatctagattaactaatatatattgtgtgggagaaaacatcatagtttcattgctattccacagtttaatcaagggactatctaaatctttttcgacagaaaaaagcttccaaaattatgcagttggatcgctttgagattcatgccacatgctcaaaccgtttttttttctcccttctcttcctcatcccgcctaccgccgttgctttcacgtgctcgcgtacgcgaccgcgcactcctgcaccgcctccgccccaccacagtatagctcgatcggccatctaggatggggctgcagaggaggacttctgcataagctctggtttgagaccaaatttaggttgtgtttggttccacgttaaaattaaaagtttgaagaaattaaaatgatatgacagaaaagttaaaaatttatgagtgtaaaaaagttcgatgtgacggaaaagttgaaagttgaaagtaaaaagttgaatctaaacagggcttatatgtcctttctataccttcggcaattggacatcactagtgaacacgtcacacttactctcgcacaaatcatttttccagtacaatctaccgtgaaagtagaaaacgtcgcatcgaaccacacgtaatttacagcgactcgtgtaggtgccacgtcagttttaaaccggatgcgccacgaagctgccgctttcctcgtcgctggcgccggcgccccacattttcccggccatcattcccgccgacgagctcttccacttcccgtctttcttccccttcgagaacgacggcgcgccgccggagtcgtcgcggcaggcggcggccacgctgaacgtgcggtcgtactggaccaactgctcgagcacctccttcatcgtcggccgcgacgccgggtcttcgccggtgcagatcatgccgagcaggaacaccgccacggcgtcctccaggaacgccgccctgtcctggatgctctcgtcgacaacatcgtgcagctcgccgccgaccttttacctccgccacgcccactccgccaggcaccagtctgcgccgccgtcgttcgccaccctcccgtcgtcagctccagcagcacgacactaaatttgtgatactggccttatcatgtgtagtactttattttgttttagattataagacgttttaggtttttgaatagattagtgcatagaatttatgtatagacttaatacatgtgtttaaaagttatataaatatcaatagatctagacgagaactggaaaagccaaaacattttagatggaacggagggaccgagggagtaggaaagagccaaggactcaagactgcaataggtcaaggtcttcgacaactaaggcgaatcttcttgggcctcttatttcaaatgaaatttgggactatttaggcccacatgtcttttggttcttaaaaataaatggactcttctgctagtggatcctcaggtcgatgccaaagaatactcaggctggacagtttatatatggaaaatggtctgatgttactcctgaatatactgaggctgtgtttagaggtccagggataaaaatttttgctgtgtcacatcggatatacagacatatttaaagtattaaacgtagtctaataacaaaacaaattacagaatccacccgtaaactgcgagacaaatttattaagcctaattaggcttaaaagatttatctcgtaatttacacgcaatctgtgcaattagaatttttttatctatatttaatactttatgtatgtgtccaaatattcgatgtgataggatgaaaaaacttgccaagggatcaccctgaactcattttcattttggaagaactacaacacaaaggtatatatgtaagggtctgaactctgatttccccgaagcaaacaattgtgtccgggccctcatgttccaagaaacgcaaggaaatagactacaattactaagattttacaaaagtacaatgttgcagaaaaattgtgagaaacatcaatcatatgatttttcctttgtttcaaatgggttctaaaatctatatttttgaacatgttaatttattcgaaattttcaagcactcatctctacaagtaaacataacttaaaacaatcacgttctgaaacaaaatttatttttacttctatgccttcggcaattggacacaaatatggtggacacacttttacccttacacaacccgtttgttccctgcacactctacagtagaagtacataatttacagcgaggtgtcacatcggttttaaaccggatgcgctatggcagcagcgacttgtgttggttccccttgccctaccccttctcttccctaaggccttatttggtttggagggaattaaagaggattgaaagagattgagggagaataatttcacaccacaataggtgtgaaataaatcccctctaattcctcccttatggagattatccgaacaaagcctaaagcagcggcggcaagtacccccgtcttgccgtctattccatctccagcggctctccaccaccaggtccacaaccgatcacggtgtcctaatcataagctctaatcatggccatgactccaaactcattgatcttcctttttccccttcccctcaacctcctcccataaccccctttttcactacgctgtacagtagaagtagaaaacgttacatccaactacataatttacagcgactcgtgtagttgccacgtcagcttaaactggatgcgccacgaaactgccgctttcctcgtcgccggtgccggcgccccacattttcccggccgtcgttcccgccgacgagctcttccccttcccgtctttcttccccttcgataacgacggtgcgccgccggagtcatcgcggcaggcggccgccacgctggacgtacggtcgtactggaccagctgctcgagcacctccttcatcgtcggccgcgacgccgggtcgtcgccggtgcagatcatgccgagcaggaacaccgccacggcgtcctccaggaacgccgccctgtcctggatggcctcgtcgacgacgtcgtgcagctcgccgccggccttgtaccgccgccacgcccactccgccaggcaccagtccgcgccgccgtcgttcgccacccgccccgtcgtcagctccagcagcacgacgccgaacgcgtacacgtccaccttctcgttcaccttcgctctgcacccgtactctgcgaccgcgagacagacatatcgtcgaacacttgactctcatgagctagctcgatcgatggcgagcaaatcaaatcaaattaacgaacaacaatcttgtgatgaacctcacctggagccatgtagccgaaggtgccaccgatggcggagatggaattcggctcgccggacttggcgaggatcctggcgaggccgaagtcggcgatcttggcgcggaaggccgggtcgagcaggatgttgctggacttgacgtcgcggtgcatgatcggctgcgcgcactcgtggtgcatgtagctgagccccctcgccgcgtcgatggcgatgcagagccgcgtcggccactggagcggcgccgtcggcgcgccgccgtcgtcgcggcggtgcagccaccggtcgaggctgccgttctccatgtactcgtagacgagcagcttggtgtcgtcgccggagatgcagcagaggaggtcgatgatgttgatgtggcttacctccccgaggatcctcacctcggcgtcgaactccttgtcgctcttcgcgtccgacttggccgccgtccgccatagccgcttcaccgccaccaccatgccgtcgctgcccttgccgccgatgttgatgcggtacaccttgccggagccgccgctaccgatcacgttctcctcgtggagattgccgagcacgtcgcattcggagaagtgcagggtacggaacggcgtcatcttccacccggcgaggtcttgctgacgcttctggtgtcggatgatcagcaaccagatggcgacggcgccgatgaacacgacgccggtgagcaccgagaagacgatgatcaggttcgtcgacgatttgttgtggctttggtgggggcaagccggaaggttcatgttcgtgttcaccgtggcacagaggccatggttgccgaggaagctacgatcgtaggcgccgttttgcagcgtctccgggacctcgccggagagctggttagaagaaaggttgagaaagttgagatggagattgctgaaatcttgaggtatgtcgccggtgagcccgttgtcggagaggtcaagaatgtagaggcccatccacccgactgcggcagggatctcaccggaaatctggtttctgctaaggttgagggaggtcagacttgtcaatgatttgatagacggcggaatcgagccggataactggttgccggcgaggttcaactcggtgaggttggcaagcctagacatgtcagctggcagttcaccggagaactggttgttctccgccgtgaaactcttcagaccgacggcggtcgacgggagggcaccggagaagcgattgttctccatctcaatcctcgagatgttaaatgatatctcactgggtagagtgccggtgaagttgttgttgtaaatcatgacattggtgagcaactcgaatgaccatatcttcttgggaaagtccccaacaaagtggttgttgtatgccatgatgttgttgatggttttgcaatccccaaggttcgtcgggaacacgccggagaagctattgttgaacaccacaatgtcaaagagcttcttattgaagcaaagtgtatccggtagctcaccagagaggttgttgttggacacctcaaaattccccaattctgaatgttttccaagctccgcgggtaggggcccagagagcttgttattgaagagacggatgtcggtgaggtccggcatcataccaacaccagccgggatgggtccagtgagattgttgtagtacaaatatagtaatctcaacttcttcaagtttgcaatgtcctctggtattgatccagagaacttgttcatggacaggtcaagctcctgcaggttgagagctgtgatgttaggaccaatctcgccactcaaattgcttgcatagagatatagattctcgagcttctggtgcttcaatacccactcggggatttgtccctgcatcttattttgtgacaagtccaacaatgtgagctccatcaatgacgacagatcatcagggatggtcccagtaaggttcatccatgacagccacagcattttcagctttgtcagcttgccaaactcctttgggactggacccggctcgaatgggttggatgccaacgtcagcgtctcaagctccacaaggcctccaatggcggcacccgggtaattcccattgaatctattagtgtcaaggaccaatgacttgagcttcgagaaccttgcaatagccgacggcacatcgccggtgaaagcattgctggacaggttgaggtgttgcatccccaacgatagcctgtcaatgcggtccggaagtctgccggataattgattgttggataggtcaaggaactccaaagctgagcaaccgtagagcaccgtggggaaatcaccggtgagattgttgcaagagaggtctatgtaggtcagattcttgaggctacaaacggaggctgggattggtctggctatatggagacttggcaaggagaggccagtgacctgacctgtgctgctactgataacaccagtccagttgccggtgctgctccatgaactgagtggagctgggttgtcccaatcttgcttgattgctaggagtagtttttgctcgtcggcgctgggctgcgcagtcgatagagagaagagcaatagtagtagaaagaggatgaggatgttgtagacagccattttttgcgagtgtggtgtgttcttggatgttcagacatggcgtcggagtgatcttaagtagaaattaaggcagagagagaaccaccatcgaagtgcgtcactacctcaggtcaagtcttcggtatagcttccttagcaccaatcctctagtgattgaaagatgctctgatagagacatgtgagttgtcagttgagcactatgctatcctctttcatccaacttgaatgtatttaagattagaagcatgaaaaggatgatcaccttctggtgtagtacaagacaattacttggaatatgttccgtttgatatatatgcgattatatatcactatgatacggcactcgaaagcaaggacatgcagtgagaatggaattgccgtttcctagtcgaaatgttcttattctgttctgtcgaaagtttttttatgctttacatacatatgttgttctgtcttttcggcagaaatgggggggggggggggcgagattgtatctactaccgtctcttgtagctgaagaaactcgtgtgattctcgatcgcccatatctgaaactctgaataattggtgcaggttcagagagttcaggacttcaggtatattcgccgcactctgtttctgaattcagtttcgtttcgttgtgcactgtttcttttgccacgtacgtgtgtaaatcatggaattctcacaagatgttattaatcgggacaaaaactaagctctctccaatggagtggtgtcatcgatttttattgatattacgtatggagaagggaaggtatctcacgctcatgatggattttatgttctaacatcaataatttgccacagtagcatactactataaatccggtttttccaaatgtccaattgtggagattatgagtatcccatacccacacgatatggttttccgactgattataggggataacttatatctatggaatatgtaacggatcatgacttgggtattacgtttccctgtttattatggaatagcctaaagtcctggtttgataaaattataaagtagatttaggaaaccgataccgtattggttaaggtttctatcttgtaatcctgccccccatcctatataaggtgggcaggaggccctctagggggcatgagcacatatgatggtcagatctatactacacccggcggattcaaatccccaaacatgattagggtattacctctctaaatccttgtctccgcatccatccacttttaggtctcgtgcgctaccccttttattattgccgaattcatgtttcgacaccaatcctagtttttgcaggcggcaaagcgatcatcacgtaccaaatggtctgtaaaaattgatatcgccgccggagcccgccgcctagagagaggagaggggagaggaggagtaggagaggtcagaggagatagccgggcatagagagtgtgggtgatgggagagagagaggagtggagaataaataaaatagagtgagctatttttgcgtgcgggtgagttaagagccctgcatgtaaacataccttatttttgtgtgcggatattttaagtggtccgtctgaaaaatttgaattttgcgtatagatctcttaaagagccgtatgagaaaatgagggtcgatttttgcagacacggacactaatggtccatctataacctattggggtgttcgtctagaaaaatcattttttaagaagtggcaagcataacccccaatgcaaaaacttttaccagatttgtagataacacctatacgacaatctatcatttcgaaaaattccaacacaaaacagtaacaaacctttgtcttctctaaagaaaaacaaacacaaccctcttatgtgtttcaaaaattacggaacaaatcacacgacaatatctcctaaactctcaagatgacattctctcgttgtttagaagtcaactaaatagttatgaaaatttttttaaaaaaaattaacaagactgattattatgataaatcactctacaaatatacaagttaaaatttaacttctacaagttccaacagaaaaaacaaattaaactatgactagttaacgtatattcgtaattaatttttttattgcagaagttaaatttgaccatgtttatgaagtggtttatcatatattaatctatcttgttgaatttttttaaaaaaaatcataactaattgggtaacatgcaaacaccgagagaaaatcctgtcaagagtttaaaatagttttgcaatctctatcctttctatacgcaagctatctttgcgacgaatattagccatttagcattatcaaattttagtagggcagagaaccggaagttcgagatattcgcacgtctgcttcagctggttgtggacaaagaggtgactccgtgactccccgtcgtccgcttgtcctattgaagtattgatgatagagcttgatgactgatgagtgaacgacatcggctgaactcgcagaagaattctctaacgccgacgatccagtcataatcagtgcggaaacttgaagctttctgctcttataacccactgtcgatctggccatttgtacaaacgaagggacgggtgtgtaaagttttggcattgtcacatcaggtattatgtaggatgtcgcatgagatgtttgggcactaataaaaaaactactccctccgtattttaatgtatgacaccgttgactttataaccaagatttgaccactcgtcttattcataatttttatgcaaatataaaaatacttatgtcatgcttaaagaacatttaatgataaatcaagtcacaataaaataaattataattacataaatttttttaataagacgaaagatcaaacgtttgtcaaaaagtcaacggcgtcatacatataatatggagggagtaattacagaatccgccagtaaaccacgagacgaatttattaaggctaattaatctattattagtaaatgtttattgtagcactacattgtcaaatctagagcaattaggcttaaaagattcgtctcgcaaattagtcgcaatctgtgcaattaattattttttagcctatactacctctatcccatattacttgttgctttgacttttttcttacaacatttgaccattcattttatttgaaaaattagtgcaagtacaaaaataataagtcaaacttaaagtacttttgataataaaacaagtcacaaacaaaataaataataattccaaaatttttttgaataagacgaatgatcaaacactacaaacaaaaactcaaagcagcaaataatatgggacggaggtagtatttaatacttcatgcaggtattcaaacattcaatgtgacagggtaaaaaacgttcgatgcgatggggtgaaaatttttgggatgggatctaaggtgtgtttaggctgtgtttagttcctgaaattggagaaaagtttggggaaagttgagagtttatgtgtgtagaaaagttttggatgtgatgtgatgtgatgaaaaattgagagttgggggaagtttggtgtgaactaaacagggccttagtttacgccaaaattaaaagtttgattgaattagaacaatgtgacggagaagttggaagtttgtgcgtagtaaaattttaatataatagaaaagttgaaaagtttaaaaaaaaaagttgggactaaacgaggccctaagcagccccgaaaaagagagaacatctctctttatgtcagaaccatggtgcattcagcagcaatcttcctgagggcatgtgcatcactgattcactgtcaccggctggcatgcgtggtggctgtttcgcttgtgaggctgttcgtgtgccaaactttttttaaatatacgaatacaagtaataaatatagactaataataaaataaattacagattccgcctgtaaactgcgagatgaatttattaagtttaattaatttatcattagcaaatgtttattgtaacatcacattattaaattatggcgtaattaggctcaaacgattcgtctcgtaatttacagttaaactgttcaattgatttttttgtctacatttaatacttaatacatgtgttcaaacattcggggctactttggtttgtgacctaaattggccttaccaatttttggcaatgccaaattttggcaagttttgatacgaaaaattttgagaaggcaaagttgtgtttggattgaagccaaaatagcctaagttaactattgaaatagcctattttcttaggcatgccaaaatttagcttcaaatcaaatagacactaaatactattaaaattgtcaaatattggtaagccaaatttaggccttagaccaaaccagtccttgattttacggaaaagttgtgtgtagctgcctgcagtgcaagtgattggtttgtcagaagtcatcaagtcaaagtcttctccaccaataatgtaattgtcattgtcactgtaactgtagttgcagtggcccacctagactattccacttctagaaggatttattttagtgcttaatacttttatcgtaaataaacaaattaaacacgaaaagtaacacatcatgctactgtaagtttggataggctaatatgtgttacagtacatctgtattacatctgtgtttagttccacgctaaaattaaaagtttaaaaaaattagaatgatgtgacagaaaagttgaaagtttatgtgtgtagaaaagttcgatttaacggaaaaattagaagtttgaagaaaaaaaagttaaaatctgaacagagcctatgtttgttcattttaaagagagggagtattaattattgtttgttcattttaaaacagagagagtattgattattgtagggtctacttggaatacatacagcattacttctacttctatgtacagcatgggcaactggcattggtcaccattgacctatttttatattaataaagcactaaaataactagaaaaaaggtgatgctgcaaaaagtattgcccaatggtacataacggtccatatagattattacgaagtactagtggcccggcgaaaaacgaagtaccacaagtgtaaagaatgtgggtgcagaagaactatccatcgtccccaaacgactcgaacatcaaggttgtcgacaaagcatcaatcaaatctatgataccgttatttcataataaaacaatctcaatcacgtatattttgtaaaagaaaaaagtgaacttcttcttgtagagacagatatagtattaaatattattgcatagaggaggaacttgacgcgcgttcaagtcgatcttatacttaaaattgatacctgtattttacaagaatttaatttagaggataattcatgtatctgtatgtatgcacgcgcgccacgtgaacagctgccctcctctagtcctctctcctgtatagtttatgtatatatgtatgtatatgctatatactcatatatattatatgtatgtatatgtatgtatatgtatgtatatatatatatatatatatatatatatatatatatatatgtatatatatgtatgtatgtatatgtatgtatatatatatatatatatatatatatatatatatgtatgtatgtatatatatatatgtataatttttaatgtataaaaatatatatatatgtatatatatatatatataatataaacaaatatttatgtatatatagaaagtttatatacgtacggataaaaagtataaaaatatatgtatacaaagttctatacttatacgtattaaaaaaccgaaaaacaaacaagaaagaaactgaaaaacacaaaaaaaaaactcgcttgctctctcccatgagcagcgcgctgtccgccaccctttcttcgtgcgcgccatatgtctagtcacgtggggagggacacgcgcaactgcccaccaattagcaaatccacacgcagtgtgtattgggttgtgaaacacgtactcaagcttaggggatagcatatgtatgtaccaatctcattgaaatgtgtaatctgatgcacccatgtggtgtgtgcgtgagcgtatgggtgagtttaacttcttgtatttaaaagaaaacgacacacgcttccaatggtagatcccaggcggttgatatttttgccatgtatttgtgaagtgagcaaaaaccatttgaaagaaaaaggttttttaatatggagtacaatacatggccgatttatattttagtctataatcttggtttaatgtatcaccttaggtccaaagtgcaaaagacttaacttgagtgttaacgtggtcatccatagtaatgagaattttgtatttaaactcccaccattacaatattccccaaaatatattaactccccatgctcccaaacctacttcccactgtgtgtgtgtgtgtgggagaggaggtcaagaggtggttattagggtggctgcaatccaaggtagacggtgcaaggcccatcgcttgtcttcacaacgacaatcgtgccacactgagttcgtcggattactctcttcctatcacatcatctatctcgactccgaggacctcctattactgacaatcaatgacaccctaatcaccatctctgcatctccacttccatgatcgtatggtggggggtcaatttaaagtacgtcctatttggggaagcttctatctactgcacttccagaagttccaaaatttgaaagcataatgtaacacagaagtttgaatgcaaatttcccatcaccgtggatggccacatcaacgcatgagttgcgtcatctgcactttaaacctcaggtgatacattaaacgaagattaaaaacccaaatgtgtatttctacaagctcacatatctagatgacacttagtccatatttaaggaacggttgtgtagtttttactcttttatatattacagtagtatgaggatcatactttatgttgggagaagtcacaagttgataaatccaagctgtagtagtatctattaagcacaggaatacaaagaaaacttttcaaaaaaatcgttgatggcacctaaaaaatgaaagaggatgaatacacactactacagaacatcaaatagatgctggcactacaggtgccggaagtgctaaaaccggcacctataggcctttttcggcctctacgggctgaaaatacaaaaaaaaacgggcatctttatataactatatgtatcgattctaaagaaaaaccgacacctatactatagatgccggtttttgataaaacccaaaacctttaatttattaaaggtgtcggtttataaccgagccaagccgggtggagacaagccagccgagtgggcatctttttatctctctcgatactgtgtccccaccttatctcttctcctcctcccaccggctctctcccactgtctatctcccttatctcttcttctcctcccaccgactctgcggcgggctcgcggaggggacacggcggtgcgcttgctgaggtgaggcggcggtctagccgcggggaggaggcggcgacggcaggtggaggagccctcccctccaccagatccggcgggaggggaggcggcaacggacacgacggagctcacagatggaggcggcggtggtctcgccgagggaaggcagcggcggcaggtggaggagccctcccctccaccagatccggagggagggaagacggcggcaggggcggcggggctcgcggatggagatggcggcggtctcgccaggggtaggcggcaacaggcgacgggctcaccaaggggaggcgacacgacaggaggtggcgcacacgcaacggctcgaagacgacgactatggcagcggctacacgaccgtgcgacgatgacgatggcgggacaacgacagagaggtgtggaagaggtgtggattcttttttattattattgccaagatctgggatgaatttgagtgtcaaaatttgtgttgtggatgaatccatctatggattttttattaccaagatctaggatgaatttgagtttcaaaatttgtattgtggataaatggattgatatgtggatgaatccatctgtggattggatatgtgatggattagatgatatgctcgtggtcgtggaacctcaaaggcagcacctatttcttttcatatcagtgccgtctccatagtgctggttgggaaaaccagtagctaagggggtttctcaaccggcacatatttgtgttttgacactatggatgcatgttggtagctttccaatatatacacatcatgatgcgcacagcaccaattttatcatgaaattattgcctagtgacgattattttgactggacataagaggattagtggttcacggacaagaagtaaatattagggcccactcataaaaatctactgtctccggtcaaaaatataataactgttggctaagtatttgacatacagtgatatatcaagttatcaacttctaactatatatcagaacatattcaaatgtgtccaaatacatagagcacaaaattattatattttaagataaagggagtacatagaaattactgggttgcaaatgctagcactcaataccacgcacgcgcaatttcatcaataaccattagagtttagttgttgacaaaaactagctagtttttttcagattatttactattaaatgaattatttgctaaaagaaatacattttctcagaaagctttcttctattaaattgtttggaccacttgttttaagttgtttgttaaatttatttactaaaaaaatatttatctccataatccactagataatccatagcaataatccgcttaataatctatttcaaaccaagccttgaacaaattttactttttatttttgaaaaaatgctcagtaatttgtaaaatatgcaatggaagtagtaggtgggatgggggcaaccaccaccttatttttagtatagtacaatattatatattaaaaatatatgcacacaacatgtcgataacatcaaccgggactaaagatcttcctcttataaactgggactaaaaattatttttagtcccagtttttaatggaaccaggactattgtgaatttgggtcgaccgaccaaagatggtttctctgccagtgacagcaggttaataaatatgaaggacaaatttgtatgccacacaaatttctgctgaaaatatgatgatttaaataatgataaatgaagtcaagcaaccccacaattataccgtgctccaattcgtagggtgtgtttttattgttcttttcaagtaggatatgatatacatccatccatttcaacaactcgtacacacattgtgagggtgcctcttgtgcaaacggagtttaataagtagctcaaattgatgaaatatagatcgagacaaataattaagcatggaaaaattggccagtataatcgggtgtatcccttgatgattactcctatgttttaaaatattcgaattattctataataaagcagatttacgataataatccaatcaataatctatctctaatacgacctaattcatttttatgcatcgagaaggcgtggcttggcatcgaggcatataatcatcgatctggattatgaacaacccacatagcacgccgaaacgagcgaatatgacatccacgaacaagtggcctgaatgcctgatcgatcctaggctagctcagctcctacacacacatcactatataaaagttactttaaaatgtcatattactctatttttcaggtttaaaataatcaatactcaatttaccatgtagttaatggatcatcatctcgtcttgtttacgtatattctcaatcttctcttttcttctcctctcaaacacatccagcaaagtgtacatcaaccatgagttagttgcacatcttctttaatttcacaagtgacccactactgtagctttgcgagttcttatctgcgagtagaagatattactgtgcctaaccctgtaaacagtgcgcccacagggcctacacttgcatgaatcagcaatccacaaacttttagaacaagttcggcagtgatgtttggttactgcggaactccggatgaattaaccattaaaaattaaaaaaagatttatttgatttaaagaaacttatatgtagaaaatgttttcacaaaacgcaccactatactcacggaaaactaggaaattaaagttgcttaagagcaagtttaatagtatagcccactactatctccaaatcatctatagccaatatcatagccaattcatgcaataattgcttactatactattaatacctggtcctacctgtcatccacacattacgtcttggtgtccgtgttacagctggctataaatctgtagcccgctagtcttctctctattctcttatctctttaaaatatatttatatctggcttatagcctgctattgtacatgctctaaataaactcagccagtgtctgattcctggctcactagacatattatcccttcaagtgcttcaagatttgtgcatggcatagatcaggcctgttgaagaatccaacggcccgtactacttcgccatcctaaacacatcgacgcctatagctgcagtgatccaatacagctagttccgtactaggtcctgtttagagaagaatatatcctacataattaagctagtttatttgtagccctgtcgacaggttaactggggttgtaagatttgttcgcaccaatggaggcaacagcatggtttcagctgtggcttcaagcatggtcaggcttgcatttctaattgcatggatggtacacaatggaattttgtccccaaaagattttggaatttcaaaggagaatatgtgcctcagtggactgcaactgcaagcataatttgaccatggctattcgatcctccgctgttttttcttttcagaaaaaaaaggtatcatatatagggtggtctagttaaactataagcggaatccattgtatgccatccacaaaaatcattatatgcgatgaagcttggataaatgagtccacccaactgagttttcttcctttatatgttgccaccacaaatccactagcacccaacaactttagatagaatggaaagaaatgtttgttcctagctaggttatcatgcattattattctcacatgaaatagtttttggataacacaaattttgacagatatgcacatggaagtgaggcctttatttgtcagtgctgggagcaacaaccctatttcagtcctctagatcaaaatcttttcctaagcttaatggagaattgcttgcggatttgtaatgccgattgcatgaggaaataaaacgatttaccccatggcagataatggatttgggccttttctttattggtgtaatgtgcaaggaaattttctcttagactatgcatagaataattattctccaaacttaattggctactcttcatagccccatttactttagttagttactccggtcaaaaattacttgatgctgccggtggagggagtacttcatgcgcctaatgcacctaacatgagtggatcattatgaatataacaagtattgtatgcttgaatataagtgtaagtccgacaaagtcttttttatcataagcaataccaaacaaaggaggaccaagtgcatgccacatcaagaagaatcaaaagatcaaaacaaagtcttgggtgaactttaaaaaatatgcatataatctgccataaactaaaaagagaaatccaagatttgggctgaacttgatgagccatttcagcaggaaagaactcagtcaacagagtatatagattaacagtataacagagccccgtcaatgtattttttttttaaaaaaagaaaccgtttaatgtttaatgtgtaagtagttagactgcgtcaaaagctaatactgtatgtcttatttttaatcaacaaaacagagtaaatatagccgcaaattgtgcatccttctgtaagctagaaattgtgcgaatcatgcatcctgacaagctagaaattccaaatgagaactctacgaacgaccggccaggccggcactggaaagtggcatatcttagtacgtatgcatatgcctccattcgttttcataaaccggctgcacgcgtgcgcagaagctggggactattcaggcaaatggctaccaaacagatggatgagtgtatatacaggttgtcccttttggtaccaaccgaactgagtgatcaaatctatgctatatatctcaggatggtggcaatcaatttgtttatccacaaagataaggcagtgatgtaacttacaatggattacagcttttttatctgcttttgtccatcagtggacgagtccaagaacacgacctgcctttgaacgttgaatagtgctcaattagttagctaatatacgtaggatcgatgtagccatttcaattaatcaagtggcgaaaggtgaggagctttggcctttattaggaggtaagaaatggagaatctaggaggcaatgatgcggcaagaatcatcattatatataatggagagtaaagtggtgggtgaaaatccaccgtagatatgatatgatttatcctcgtccaggggccaagacatgcctagggctggtagtgcttaaattctaggccaaactctgcaatccaattcaggccctataaaaatacaatagaaattctgaaaatatataatgggtagttaagggcatatttgctcagccctagccgccttggcttttcctatggctcaatccttgtcctcatcaatcttgttgagctttcaccgaagcttcggtagatacttattatcctgcttgcaaggaaatggcacgatgctctcttctaatgttgcataaaagcaagatatttcattcaaaatgaagggaagtgttgtgatcaacaatcaagcttaaagatgagtgcaggacattcttaataacctaactagtaaatactacttgactgcaacttcaaatctatttgctttgtaaaaaaatgcatgtacggttttgagcgcctaggaaaaaaaatgcatgcccttgtatttagattgtttatttcagttagctaaacttccactattatcacttctagaccatggttgaacctccaggtgttcataatcgatgttccaaatagttaacatatgatgttccagttccagtggtatcgatagtatttagatttcattttcaaacaataaaaccagaaactttacacctctaaactaccatactgtgtataatgatagttacttcctaggatgttgttttttcctttatttttagaggactccttaaactaccatatctgtgcttgttctgctgctgccaacacatgttcattaaaccagatacaaccatgcataacatatacatttagctaaaaaaatttggtgaaaatgttgtgcattggagacaggaaaacttcagctaaagcttactactgtatattgggaatccagggaatatatatatcagaatattcagaattatcaaggcaattaataagcaaagacagcaggcggtagtaaactaaatttcgataccttcgtgatgagagcgaaatcccccgcccaattcttccggagaaggaggaagagaaaaaggcgctcacggcgacggcgggggaagaggtggttagaacccttgatgctgtcgcttcgtcgtcgacggggagcggcggatcgatgagcgcgcctcgtcctccgcggcgatggaatccgtggctaggggtggggggaaggaggagaggcgccggcgtcccgcggggaggtttcaggggtgcgcggcgcggaggcggcgccggcgcggacgcggaagaggggggatcttcgcaacgcatatgatccgacggccacgatttctcttctgatacgattttcacaaagcccccttgattcgagtcgatacatttggtagcgatccgaagttttacacaaagcccccactacgtttacatcttaaactcaattttaatcttaactaattaaaagattcatattattcctctcgtcgcatcctttgacccgcgttttttcgtccgtcaccgtccccttccgctttgtccacaaaaactaggattcggtttggacagataagctcgaatcgagctcaattccgcgttgatttcttcaagataagatccgattcttgaggaaaacggaagaggaggataagagaaatatttccccttaaccaattttggaaaagatcgaaaggggagccaggatttggaggagaaagcggcgccgggtcgggctcagtctccggccagaggttgaagacagcactgtagcgactgggacgtggtgtggactttggggaaaaaggctggcccgagaggagaagaagtagggacatgaaacggactttcggcgctgtaaacttcgtggattaggcccaagaaagagagaggatttttaattacttctccaaataaattaaccaatgaaataatctttgaattgttaaaaatatttccaatgctcaaataatttcaagaaaaatcttgaacatacttggacactctaagtatttaacaacattaaaacaagatcatttaatgattaatttattatttaaataattactgaaatgttctttgtattattaaaattagtagttgagctctgaaaaatcctagaaaattccaaagagcagaattaaccatggagaatttaataaaattaaatccagccatgctttatatttaggaaattttattatacatttacaacttactaatttatttatatacaacattaattcaccaacaaatacatagcattaagtgtaaccaagagcaaaaaaatgtggttggatttatcacgtcatctttccattcactacttttaaatgatttttctagatgagcacccgaatagattgtagacaggccataagtgttcgtgcctgcaaaaattgatcccgattttcccgtacggtttcttaagaaacccgtatgcaagaatcaatttttccaaatggaccatttaaaatatccacacgtgaaaatgtggtgtttaacttacccgcatgcaaaaatacccctgaagattctcacttttgtttattctctagtcctctctctctctcccaccacccccactcctctccaccctaccggcggcgggcaagggcgacgacgacggcttcctcctcttctcccccactcctcctctcccctctcctccctcccgatgcggtggagggctcaggcagtgggagagggcggaggagggatgcgacagcggtgacggatccgacgatggtgaggcgtgtggtggcggatccgacggtggggaggcgcggcggccatcgcccgcacggatccgacaacggcggatccggtggtgggaatgagcggtggcagcggatccgatggtgaagaggcacgggggcagcggattcagctccccctcccgcgcgtcgacggtgaagggagtgggcagacccagccaaccctagccccctacgccccacgacaaggacggggacgaggatgaggacagcagcgacgacggtgacaacgacgacgatgacgaggaggacggcgggcatccgtgatatggacaatattacatgacatacaaaaaataaataacttattgtagccataaatataggagtcaataaaaaacaattttatttcaaggtggtatcaatatctttcttataatcataaatcgactggatttaaaacaacaaacaaataggtatgagtgtagtgagtgtcaattcgttgcaccacaatacaaggttcgatttagtggagttgctttcggttgatgtgtcatcgctttcgactccttatccactaacttgcatgtgcagagtatgtatgtaaaatcaaaattgacttcatccgttacaacacacgagcactgtgctagtagaagtatagaactcccccatattttgtaagaaaaataacctagtagggccaactcaactttatttggtagtagaaaaaagataattttttggtgagtagtactctcaaatgaggttgagtttcaacttattattatttggtgttaatatacttcatgcctatacttatctctagtaaattttttctagcaaattgtctttcctagctgaatgtaatataagtttataatctttcagatgcatgaattatttaaccaaatacagagtgttcagttatttggaaacgtgaatctttttctctcacataatgtcgatgtttaagcattgaaactattggatccatgccattgtaacttcttcggttataaaaaaaaatgacattactattcacttattaaaaatgccattacaatttgactaaaattagagatataccactacgtaccccttcaatgcacttataaaaaattttgaaccaaattacccctccttcattcacccccttcttccttacactagaacctccgccacccacacactaatgttgaaggtgaaccaccccctcgtgtcctcctctactttgctttctcccctaccaccgccaggggagctccaaaaagggtgacagcaagattcgagcttgaaggggctaccacaaaccgctcctcgacatggtcatcccagttaccaaggttttcatcggggcagccccgccgccaccactgtcatccaagaggacgacgagatccgcgattatctaccacgagctcaatgggatggctagtgatggagaggtcgcggctctatggtatggggatggacggtgagaagtgggcctaggtggagagggcggcagccagcggactcgattgggatcaccggattggaccggtggaagagatgacatagattagtgagagggagaaggaagaaggaagtgaaggaaggagaagggataatttggtgtaaattcttattgcattggaggggtacatagtggcatatctctaattttggtcaaattatagcagcatgtctttaaatagatgaatagtaatggtatttttcaaaattgaagaaattacaatggcatgagtccaattaaccattgaaactaatttaactcacttctctgatttgttttataacaattgaatgtgctatattaaattactaacccaattaaagcatataaaagcatcatgaaacatctgagctttggccactgatcggatgagccatttgcaagttgcaacacacgttggagcctcagtttaggccccctgatcaacgtttgcaacaaatttggccacatttctctgaactaggaaggtagcccgcgcagatgcgcaggcaatttatttattgtttacaaatttaattggtaaattttgagatagatctaatggtttagaaaatttgaagatttttttcttaagagagtaggaaaggaaagaggagatgaggagagtacggaagggtgtggagaaggtgggagcacatacttttttttattcgaactaatagttaaaaatattggacccaccaattttaaaagaaaatcaatggatagattttagagtgtcacttggcttaatccaaacaaattaaaattaaatcagatctacttgaaaaaacacaactaaattgctttattttttcgcaattacgtagtacatttatcaagtgatatttgatatcctaaaatataatatgaaattatttaaaattatcataacattaattattatataaatttagaaccgcaatataaattttataagacacaaatattttatttaattaaagaaatgcaacgggatcacaaattgattatataatttaaaataatttaaaagatgaacgtttagagataattgatttcatattttttatttatattatagatctagtttatatttgcacatatttgtggagtaatatatttttatatggtaaaaagttatattttaaagatcattgattttgttctgacggtaatatgtattatcgattttaatttattttgaattttaaattgttggtttaattatgtatagagcaacagttagattagatatgatatgtgtagcttaaaataaccatggttgtttctctttatcatagctactcaaaaaatatagagagaagtggagggggcagaaagtgttgtgcgtatctaatggtgagggtgaggtggaggggactttgtttttctatttttttctaaatcatttaggtcaaaaaccaattatcatgtattttgttttttaaaaaactttttaattttaaagtcattataataacttaaaaaggtaatcttaattacacctatttaagctggacgatttaactggattgcttggttcgaattagctacataatatcacggtaaagccatgtaaactgatttaattagctatgtataatcttcttgtaaatctcctagcttacatatatatatatatatatatatatatatatgtgtgtgtgtgtgtgtgtgtgtgtgtgtattgccgtgcatgtaataaatatagctatgattagtagtaacacaatatgacagctaattaatctcaacttctaacaaccatagttactaatccttccgacaaaccgtacatacgtacgggagaaaggtagatctaattcattggtataaaataatgggtccaccaatttaagtgaaaatcaacggcaggtaaagatctaatctaatggtataaaataatgggtccaccaatttaagtgaaaatcgacgatgagattatattatgccacatgacggcctaggagcatttgtaggagcgcctcgtggtggcttaagagcgtttataggaagtttaatggacttttagtatataactaggaaggtagcacgcgcgaatgcgcgggcatgcgtcgtacgctaagtttgagatacttataaaagcgaaatattaaccggtgaatatctaccacgatttctccataaattgttttcgtcgacattaatttcctttataattttctaacctattagctttatattatatcatatttatgtaatatctataagcaattatttataatcttcttcatcatttgaaaagaaggtatacttattttcttaagaaaacatgtcaataaaaagtaagtgtaaaataaaactaaggtattttactttttttaattacatatatattatcatggtttattcgaggattaattgggtgggacatgaagctccactaaatatatgatttatatagcctaatatgatttatgtaatttgagatccatttatgaacattttatgtggagtgggtcagaagttctacgcaagctaacatgaaagcgaaatataattgaataataatatttttgaaatgtgatgtaccatgtatacacatatgttttttcttatataagatagatctaactattctaaatagtgattccaccagtttaaaaggcataggagtattccagaaatgtagcttaaaaattatggttgttttaatatccaacattattgcgaagtaaacgtagctcaactggttaggttcattgtgatggaatttgcccacttgggttcatgtcctagacttggacaaattcttttaagtagtaggtgacgtacccgttgacagcgagaagtgcatagtgactttatcaatctcaaaatatgtcagcctagtctctcgaaaggactaggacaaattctttcagtagtaggtgacatacccgtcgacagcgaaaagtacacagtgacttcatcaatatcaaaatatgtcagcctagtctctcggaagtactcataggggtatgtgcatgcgtgagttcatagagctgagtgtgtgcgttgtgaacacccgcgtttgtactttatttttaaaaacacatcaaacattatttagaaaaatagataaaacaatagggatgggacaacactgttgtgtagatgtgagagtgaggaggtagagattttatttttctaatttttctaaatgatttaagtgaaagctgatgacaaggtgctttattttttctaagaatttccaaggattatccccttttttataggacgtgccccaaggtaacttaagattttatttaaaaaaatagatctaataatttttttgatagataggtttagaagatggtttaaaagaacattgattgaatatttattatagatcttaatttaactaaacatattgatatttgtgaagtaatatattttatccttatatagtagaaaatcatattttaaaaagaccgttgattattatgtatgtatgtttttttctgtctttcttatgtatacgtatatgtatttgttttcttccagcgaagatcaggaaactttatcgttttgttttcacaatcatgtacgtttgtatacgtacggagagaacagcagtaggatttgtaacgtacaaactcatacgtacggacagtagtagcgctggtacattataaacatgcggaagttattattttttaataatagatttgatctaatagtgtaaaataatgggtccaccaatttaagtgaaaatcgacgctaagattagactgtgccatgtggtgacgtaggaacatttgtaggagtgccacgtgacggcttaggaacgtttatagaaagtttaatggacttttagtatataatagatagatagattgattcctagcaacaacaatttcatgtccagtaacagagaacaaaactattaaatgggtctcatgcaacaaagcaacattccaaatatcatctgccagagaataaactgcataaatgtagagcatttagctgaacatttacatgatggtcatgtcaaattgcactcacttcacacaagtgtcttaaacagaaggaagcaagttggttaagtaggaacaggaaaaccccaaaagatcagcacagcaagacattgagagaaagagacgatgatacaagctcagaagatcatattcttcttcacagcaggtcactgaatgtgtcaaagcagctccaaaaaagaaggtcaacactcagcagctgttcttttccgtccagaggttattagctgcatggattacatggcgtgaacaaatttcagaataatgcggagataacagagtttgatgtaatagaactaaggtggaaagaggtactgacagatgaagagaggtcagatgtcttcagtactctcagtctcttaactgaagaaacaaacatcctgcatgaattgcagtatcagactatcagttaggaggcatatggtccagtttgatggtaaaattattttctcccagtttgataatcaataaattttttaaaaaaaacaagggaatagactgcatatcattttcaagcattgctgtttgcataatcagcatccaataaaagtagtaactttgtttactactctctgaaaatgcaacggtaaaacgaaaaactcacccccatggcacatctccaacaagcaccttgtcgccttcataatcctcataaaccaaagtgtactccccagttccatctagcaagccagatattgccacatcttcctgctggcagtcctttgctccagcagtgagggggtctctttgggcttaaatacaacgacggaaattgaacacattggatcagatactaatccgataactcagccattcaaatttcaaaatactgaaaataacaaagaaataatttgcgaactttcgaaagaacaataaggaaataatttatgcagtgccatggttcagtatcagtggaaaactcttcagatactctatcataaactgcagtcgcaattgaatgatttaattgtgttacaaaacaacagagttgaggttcatatacctgcaagaaggcctcggaatagcttgtcaaccgctaaagaaagcttctcatagctatcaaaagcattcagatcgatctttctaccaatagggacaccatccatgtttatctttatgaatggagctctcttgatctcttctgcttttgcagccttctttccattctgcagttcaagagatgctttgctggatgtagccagatttcttctgaatgttcgaaccggaggccaaccaacaacaggagtactaggagatctgcatttcgaggttgtcaggttgaaaaaggttcagaaatgatctcctgtattattttgcaaataataactacagcaaactaaaactagagtatctgactagctatagttactatttttcaaggttgaaaagttcagaaatggtatcatatattattttgcaaagaataactacatcaaactacaaaatagagtatctgactagctatagttattacctttcaatttccgttttttgtacaaatcctaaatcacctatgcatcagaaactatttctctggaaaaaggatgttcaaattaaaacatacacattgtagtagtctacattcagatcaggaagcttagtgcctgatggtgtacaacaccagtaaatgattgctagctaatgccaaagctttgcctatatatggtgacacaagagtggcttataaatggatgcaatctaaagggtggcatatgatcaattttcctgaaattatacttaagtaaataatcctgcaaccaggtatgtcaggtgaactaacaacaactgtcatgaacagaagggacaaactagaaagtaaacaacaaacagtactacatgttgacaaagacaactgcatccctcataaatggagtaggagatctatctatctatctccatggatagcatgcaggcaggcagaagcaaacaagcaaaatggtttttgtcataaatgaggagcaggcatgcaggagatggaggcatctccctcttcaattcatgcagatgaggaggaaatgaggaataaaagaatcaggagctagtagctagctaccaatccaatagttgagtttgcccactcataaaaagcaaaagattatggtgctgtggaatttttgacatgtgaggagaggcccttatgattcccaaccttgtctggaagcagccattattgttggatgcaagtgcattattccctgtagctggtggtggatgtgcctcttcttcctctggggaccccttgtttttgtttgccttgcctgcacaagaacaaggaggaagaaacaagatgtgatatcatgcttcagagaactttttcccctgctgttcttgacttttgagcatggcacatgcaatcaagattgaagaagaaccaatgatgcaatattctactcatatgcaatacttctttttttttgtcagataatggatttttcattaaacaacaatgatattacctaggtttcttatgtaaacacacttaccacaagtattttcttgagcagtgtttaccacaagtatatatcaagtcaactaaacctctgaaaccatactgttaaaagttcagtgcacctatcagctccccccaataaaaacacaaaaagttcttaacaacaatcttcttaacaactaatttttcaggtttcttttctgctcattctcctcagccaaattttagaaaccactcctacttcagagttgagagcaatggcacacacatttctgctcaggtctcaaacgctgcattacccatatatctaactaagtttcatcagaaaatgaggcacatttttgtggtatgtcacaacaccaaaacactaacaaaaacacacgtataactagatgtctattacagtaacatgcaactgacatcgcaagaacacgagatcagttacagagttgtgaactttttcttttatctgtaccttgcgagtgggagacgagtgtggagtagcccagggagagcatggagctcttgtcaccatcatcatcatcagcagcagcagctgctgcaatggagtgcttcgtcgtcgtccccttgtccctgcacgccgctcgccatcctcctccggggagcccaaggctgagctccagcgtcttctcctcctcctcctgttcatcgccatggcgatggtgatcgcttggctcccccatccagcttccgccgagacggcctctgctgatcttcttcatgctctccgacgcctcccccatcacccgctctctagatgtacagctcgcccaaatccaagaacaaatcaagaaagcagaaactagctagctgagctgctgctgctgctggttgctgtcttggctgcaatgcaagagggagaggtgtggaacagagagctagaaaaggtgtgggaatggtagtagtagctgcagctgcaatgcgagcaacggcacacggcaatgtgatgctccgatgcgagtagcgtctagctgagcctgagctgagctgagatgccgcccatgacatcctatcctgctactcctcctatcatgccctgatagagagagattcgtgtttgcttctgctgcctactgcattctctctctctctctttctctatattcctctcactcaaaaggtggcagatggagcagttaaaatagcataagctagctataaatatattttaatgagataaaaatgagaaagaaaagcagtgggctacagatctgtagccagctgcagcacggactccaagacacaatatatgtatgataggtgggaccatatattaatagtatagtaagcaactattgtatgaattgactattagatcggctatagatgaattagactaagtagtgggttatactattaaacttgctctaataatgtggtggttttgctttagactaattaaagtgccattaacaagctcatcagctagtaatagagtagtattagcaagaagatgatgatgattatggaggcagaacagcaagcgacaaggccataggtgggtgagaatgagatggtgatggggataattaggcgtgcagcggagaagatttgcaggatcctgctcttttggccgctgctgtagacctgtagtactctactattcctattcggctagtattcctttctactctctctcatggcctctgtgcctgcctgcgttgggccgcgagcacattgctgttgtggttgccctgtctgtctatccgtgtgtcgtcagggtcatcaggattcaggggcaaatgcaaatgcaaatgcaaatatgcagtgcagagaaactgcaggccaggcagaggcagaggcagcagagcactgaaaaggttacagtggccaagcaagcaagcaaaggtgacaaccaaaccaaaatatgctttgctttgctttgcattgctttggctttgatgatttcctcctcttcttcttcttgcgcgcgggcgaggccggctcccgagttggtggttgttggcatgccaacggacgacgggttgttggctcaagaaagctgcctttctcttcctttcttgtgagttgggatcagagtactcatcgctagctctgggttcgtttgtttgtttgtttcggtgccttgcattgcgttgcacctgtaaacaattgcagggatgcaggtgtggcatgcataatgcattgattcttggagcaagcaatggagagttgttttgttggagaattttatgtagaaagtggtcttatgttgtgtgatacttcctctcttttcaaatactacctccgctttttatatatataacattgttggttgttcgtataatgtttgtctattcgtcttattaaaaatttagcgtaaatttttaaaaatataagtaaaggtcagagttttatatgataaaataaaacataaaaaattaaatagcatttatataaactttttaaacagaacatataatcaaacgtcacattaaaaatcaacgacgtcatatattataaaatggagagagtttaatatttctcagcacaatagtctacttttcaaggcatttaatagggtgcgcgcaccctcaacaggatcactctcccaactgatagtggtagctcggatctaatgttgaaacatgaaaccactcattttatattgtaaatgcccttcaaagataatagaagaaatagggcatgtttggattgttgcaactttcatgaccattctgttcctgtaccaaattttggtattagcattttggtattaccaagatttgataatgcaacaaatcaaacatgttcttgtcatttctatcttactaaaagttggccgtcccgaaggttttcgctcttaaaatctctatcatattttggtaaagcctaccaatcaaacataatcaatattatcaaattttggtaataacaaaatttatacttgggtattaccaagtttggtagggttggtttgggcagcaacaaaccaaaaagatgcttacctttggcctctgcaaaaataaatgataacattaatatttgaatcccagtgaatagagttatgcatctacgactccctcccatgatcacattgatgttgctttctcaatggagttatcttttgctttttcttatttcctgttttgtaaatttgtaacatctgttggcaactgaaaatagaatgtgaagtgagcccatggaaaaaaaaaggcacattgcacaatttgcggaaaaaatagttatcttagatatcatgcaaaaccttgcttgaaacttcatgcaaaattacttgtagcatgaaaccatccatgcaaaaaattgtgagagcacaagaatgcactttctgcatctaggaaagcaagtgcccctagaggtcaacaataatgagctggtggcagcatccaagcaacaacagtgtgcaggtggtgagtgactaacttcaacttgggtgccattttggactttggagggaatcattgtagtagtaacctccatccaccacctttgcataaacctctctctggtcccctacatctttgctcctcttcttcttggtggccgttggatcaaggattccttgatctagcgtcctatgtaaggtttgtcaatgtttctaccgcgagagagagagagttagatgaaatttccacgcttctaataaatttaattccattaatcatgtaactatgtgttgtcgaatagacaaccacgtcacgtcgaagacgtggtttttttcaaccgttgttggaaaagtgaaacagttgtattacttagtgaaaaaaacttttggaatccccctattatatggccctagggggctatttatagccccattacaagttctccctattagggtttagattttacaggggaattttcattgttacccttatgataggaatattattgagggcacactgtgtcctttacacatatgggctcctactggacttaaatggctcggcccatctatctgccaaaatttcctgaggacgtagcggcccgctaggcttcccgacgacgaggttccgtactttggcgaaaccgtgccttcatgccgaggctttcgccgcatcatctacacccgtgcagccttctggcaaggactccgcttggcgaagctggcgtaacccaagccacggcttacgcccatatggctttattctcaaccttcgccgcctgcctccggtctgagcctgttgcccgagtttttggtttcggcaggtccggccgaaggcccttcgtggtatacctccagcactatgcaaatgttgcatttctaactctagttttcctaataacctgtaatatgtccatattatacaacggtataggcctatataattagaaattgactagatgggtggactaataatctctactattataaaaactgaagatgtttttattggtctcttggtacaccatccgtatttgagtctgtcagtttgttcgcttttggaaacacatatccgtatgtaagtcggattttaagtccgtttgcttttggaaataaaaagagtcgtataagaaatctctttaaaaaactcgcatgctaacttaagatgaaagttggactcctaattgtagctcatgattttctaaagaactatccaagcgaattctcacaatgaatttcatcataactaaaccgtatagcaacaataagattaaaatagcattcacccgttgtaacgcacggatacttttttctagttcaccaataaatttatgtttttttaataccaaataaagttaagttggtcgtaccaggttatttttcttgcaaaatatggggagttctgtgtaaacgtagggggggctttgtgtaaaactttggatcactaagaataaatcactaaattttactgtggctatgcacatacttcctccgtcccaaaatataatcatttttagcatagtggcaagtcaaatattttcaacatttactattaataacaaaaaataaaaaagatcaatcatgtaaaattgatgttactagatttatcattaaacaaactatcataatatttaacttttttatttaaaacatcttacttttatattgatattgttggtcaaagtaatatctcggagaccgtgccaaagtccaaaaatgttcatattttgggacggagggatcagtacgaaggaaagggaacataaggaggacgcttttaaagaagtagagaaatatcatcatgtgattaatagcaggattttctagataagtttgtacggataacaaagaatagaaatttgaaaatgcccaattctacaagattattcttggtagatttcaccgagagaaaaaagaaatccaaaaaaaacatggcatgaatacatgcaggcgtgggtgtgtgttagatgagaagagaatatataacaaccaaaatgtggtatagtcggtgataccatctttagctagctactttctgtttagtttaggccattaggacggtggtccaaaatacatgtaggagtataaattgcagaaagaaaaggtaggtaggtaggtgtggccggccaggggccagcgccgccgcggcgcgtgctgccggccgccgccgcgccgtcaaccttttggacggacggacggacggcgcagctagcagctcacaaagattatctgcggtcaattggccctcctgccgtcccctgtactgcttctgctgatgtgatgaccacattttatgatcacagttgtgacttgtcatactttttaaataatatatttcatatgccatagatttatttttttaaactttttggctagcaatttatccaccacacttttgtggctgtcataatttatctaacgttagttgtggtaaagtgtggctggcaactaaacatgtaagttttcgtatgattaatcacattcctaaaaaaaatatgcaggtccagatgctaccatcgttgtgattcaaattatttgtgttttacatttgtatcttagatcattattttataagatatcattcaaagccagctcctaccattcgtacaacgtgcttatcggcaattttacaaaattataatggcattgttacaattttcccaataaactaaggcccggtttagatctcctgcaaattttgcatcctatcatatcgaatgtttggacatatacataaagtattaaatatagacgaaaaaaataactaattatacagattacgtgtaaattacgagacgaatcttttaagtctaattgcgccatgatttaggcttaataaattcgaattaaatttgaaaatatattgttcattcaattttttgttagaaatattcggtatgcaaaatcttttgcacaaatataccatcggtctcgcacaaccattgcgtgaaaataacgtggaaatgacattgcgaccggtatcgcgtagtgaaagtgcgagatcgcacagtctcgcgcggtctcgctcaagcaaactgcgataccgtgccttgccgatttaattagcgattaattatctgataacaatccggcccaggtggggttggccgaggctcgataacttaaggttgcccggatctcaacagttcataggcacacccactcggggaaatgtccaatctccctaaaagactagtccaatagggaaatggtggctctccccttttaaagtggcttcctcctctcaagctaagcaaggtgggattattcagaggctcacatggtcgccgcccaacttttgcatctttgccagcgggtaatagtggatgatgtcctcatcattatcctgattagcgatcgctaatcaaatggaacccattggacagtgtcgttgattgcttcagcgagaccgttcggtctcgctcttccattccgcgagaccgtgcggtctcgcgctttcaccgtgtgataccattttcgcgcaacgaatgtgcgacactgacggtatatttttgcacaagtttttgtatcctgaatattcctgagaaaaaattgaatgaacagtatattttcaaatttaattctaataaattcatctcgcggtttacaggcggattctgtaatttgttttgttgttagactacgtttaatacttcaaatgtgtgtccgtatatccgatgtgacacgccaaaactttacacccatggatctaaacacggcctaaactaaacatttgattggggaagacaaaacaagttccttttttttgacaaaaataaatccgtgcggtattatttgaccgcacgggataatcgattatcccatgcggtccacttaacccgaccgtacgggaaaatgattatcctgcgcggttgggccgcccgcacacgaaaatattcatttttccagacacctgggtccatacggggaaaacctccgcacggaaaaatcaatttgaccacacagaaatatagtttatgtagtagtgtggttatattaatcagctatcgttgcatcggagtttgtggaaatagagaataaatgtatttggaggacataaagagaaataattgcattgaaatttgataaaatatggatattttagttcttttttatgtgttgatatgtgtgcgatggatgaaaaataaatatatttttatggcccctttgaatcaaacgatttttggagaaattttataggtatttgaccctttcatacaaaggattagagctttttaaatcatatgaaattccatggaatgactcattgcacatagattttgaaaaaacacttagcaagaactcaaaactcttagaaaattttctttgattttatctctctcatcagattcctttgttttttatgtgattcaatcaaacagtcacttatgtatgttttacattttcattcctatcgtaatccagtattttttttctattctttttttttctttttgcgattcaaaggagaccttagggcatgttgatccaaccctaaaattttacgccctgtcacatcaaacatttaaacacctacatgaagtattaaatataggcttagaaagaactaattgcatagattgggactacttggcgagacgaatcttttaagcataattgctccatgatttgataatgtagtgctacagtaaactatggtaatgacggattaattaggattaataaactggtctcgcagtttactagtggatactataattagttttttattagtatctaaacaccctatatgacaccatatataataattgatgtaacactaaaattttacacgtagacacccctttagcatactacaaatcggtagaacaacacgtgagctgagtagtacgagtaatcgagatcaggttgtgatgtgaccgaccaaacaggacgacgtgtatactgttgcagtagtacattgcattggaggcagattaacttgtccacgtggcgaccggctggcaaaatttgggctttcttggcagaggagaggagcagtagcagctttgcaaattgccattgtctcgtgttgctcctctctgcagctggttcagttggtgctgtgtgcctgtgcaaaatgaaaatgcagacgagacgacttcaccaacgcgagaacgaaaatgcagacgactccaatccaccaacaagacaacggtttctatgaaatcgtagcgtttttgcctgtatttctattccctctacttctctactgacaatgttggatttgatattaaaacatcgattttgctatatctcactcgaaagattttttcttatctctcactcgattttctcactcaaatttacagtgtgttttcttgtaagttacaatataatttatgaaatttgcacggtaacttttgtaagttacagtgtaatttttgaatcttcgcatataagttttgaaatttatattggatttggtctttttttttctgaagatatggtaatatagtatccattatggtgtttcttagttgttttttgcatttttactgtgtctattggattttaatctaaggattaaaaatctgtgtgatatgattataaaaatctttcaaaagatacatagacactcccttaaaacatgccattctaattttctcggttataaatatacgctacacctgttgggccgtgcagcccacttgagtaagcctgggccgatggcaccatcgttcgttggaataagttcatctgacgtcctttaacttgtcaacaaatccgattttcaccttcaagatacgattggtccctcaattgtcaaaaccggtgtaatatagatctcaaggtggtttggatgacggttttaattgacgtgacacctaagtggctaatttgactcggtcttcatctgacatggcatatgaagcaaaaatttaacaattttaaaaaataaaacaaaatatatagacctacatgtcagtcaaataataagattaaaaaataatggaacccacatgttagtggcccccacttcctccacctcatcctttccccctctcttcctcttctaggcttccatcctccatccttcggtgctcccacagcgacgacatcccacgacagcggcgtcgaagtgggtgaccgttggccacctatggcttgcgggctcaagaacgtcagcggtggtaagaggaatagggagaggaggacggcgagcgcactgagcggtggaagaggaggggtgtgcagcagtcggcgggagtgaagcggatgctttccttttcctctagatctccgccccctctgctccggctccaccgccgtcgaccaacgcttatgcgcggaggaggaccgaccgcccgcgctgtcccttgctcctgcctcatctcccatagcctccatcctcaccacgcggaggaaatacggaggcggtcacctgcttcgacaacgacgccgcaagcgatgggcccccgccgactacttgtgcgactcctgggccagctgcgtgagctgtgccttagctttcactacaccacaagcacatgctctgataactaccacagaggccgcggacaacaacccagtcgctttccttcttaccccgttctcctcctgcacccaatagatctgccaggtcactaggagtgtagtgtggtagccctagaggcatgacgtccgatggaagagaagaggggcggtggccataggggagaagggcggcgaccggcgggaaggagctaagcaacggccgcgacgtcaccgagttcgaccgccgcagggaagtctagggacctccgctcctacatcgccgtcgtgcctcctaagctcccaccgtgggtaggctaagcactgaacccacagcaagtcagcaaccacgcggatttgggtcccctcccgatgatgatggatccgatagccagtcaccgctagatcccctcccgccgcgtctcctcctgctgttgctagtcgttgagttctccttttcgaaggccgacatgaccattccctccctctacatagttgcttccttcgccccgtaggcggtggtctccattacgatggaagaggagcaagccggcggcgacctcgtctccctttgagcggcgccagtgaagccgcccgcctccgttctccctctccgcgtgtgctcaccggtcgacgaggaagctcgaggagagaggaaggatggctgggaggaggcaccgacactgccgtccgtggaggcgatgagccggtgacaggagaggacggtgggatccactgatacgtgggtccacctatttcttttatcttttatctaactgatatgtaggccctacatgttttttaatttttaatttttatatgttgcttttagtgcctcatcactaccacagagaacaaggacaaattagccacatatagacctcgtttgctttgtaagttggaggactagttgtatctggtttttgggtggaaggacgaaaatctaggcaacaaattggacgaccacaagtgaacttattcctttcaattttaagttctatggttacaaagcccatctgcaaactgtgcaatttgactgatagaaactcatttgccatcaacacaggacacaaggtagcattcggcaacccaggttaacagaccttgatttctccatatcattacagctcacagcaagaaatacgatgtcaaaaagagccgaataattcacttaatcaatgaccacaacaaaaggcccgagtgaagaacaagaccaataaaccttgtgccagcgaactaagagcaggaaagctgattaagagccaatttatagggacactgagatggtatgttgatcaaagccaagtcacagtaaacgcagcaatgtaatgtaacaggggggcatatgtcaaaatgctcaaaaaacttttttttctagcagatcaatccatattctgcgaatagcgacaaggagatgcgctaaggggtacaaaaattgatagtgggcggagaacttaaggcagctaaggtggtatgtcaattcaacaccattgcttacttcttcttgcctgcatctccagcctttgtctgcaaaatcgacacaagcaagcagtttagttacatgtagttagcaatgcggtttataactcttataataatagaacttggcggtcaggtaagtatatagaccttcttcacaccacggatcttctttgctctgttcttcctctccttcatctgcttgcgagacttctcaaccttggtggcgaggccattctgtaggtatggcagcaaaaagaaaatgagaaagacaaaatacataaaacatgggctttcatagtgtttcacgagttaaattgatatgcatcatggaaaagttgaattccaaaacccatgaaagtaattaataggtacacctgccacctgaagctttaggcaatgaaactcattaagtttggcagcatgcagtaatgcataaggctagtgaaacagctcggaatcaagcactacatgcaacagtatattatgcatgtcaaaagatgagtattcaagcatgatttaaccaatttttcatgttataagttctgtaatcatcatgcagattagtagaaaccaccacatattgcagtaattcctagaataagatgggaagtcaaacccacaccaagcttcagcagtacatgttttacacactacccaatacaatcgcgctaacattctgaacataaaagtcatagtttgctaacaaaggcaacgatgctagtaaaatacatcatttatacgcataagaatgtgattcattacttccaaaccacattttacaagaaatggtgctctactgatcaacataaaaaaaaacaccgatcaacaagaaccaacaatactatatttttcaaaatggtaatcccaagtgaaatttactcctttttcccatcagacaactactctagtagtactagattgttcagatttcagcatagcatcacgattaaactaaactatcaagagcagggcgagatcaacgagacaagagaggcgcgtaccctgatgagcctgtacttgggctcgtacttcttggcggcgtcgaggttgtcgtagatgagtccgaatccggtggacttgcctcctccgaagtgggtgcggaacttgaacacgaagatgcagttggagtccttcacctcgtacagcttcgccagcttctccttcagatccgcctgcacacacgcacacgcacacgcacgcatgagcctcacgccggcggcgggaaaccctagcccggacggtcaccggaggaggaggaggacgcgacgcaccttggagacgttggcgcggcccgggtggagcacctcgagcacgaactgcttgcgggagaggaggcggttcgtcatgaacttgcgggtgcggagcgtcaccgccggcgccgtcttcgtgtcggccatgcttgcgtcggtggtgtcctcgccggagattcctcgctgcggcggcggcggcggcggcggcgagagaggagcggcgagcggtggcggcggcgagggagacgcgggttggggtggtgggggcttatatataccaccccgaacaaaccctaggtctggcttgggccgcttggtagaatgggaatattgggccgattataatgggcctgaagagacaaatgggccgttttgttattgggcctctcagctaccggtccgatcatatctaccagtcaaacctggcacgtgcagatgagcacagcatagtatacagctactgagctacctaaccaaatttccttttttttagaagtaacctaatttcttgcacatcacatgtagcagtagctagtagggccgagtttagttctaaatttttttcaacaaactttcaatttcttcatcacatcaaaacttttttacgcacacaaacttttaactttttcgtcacatcgttccaattctaatcaaacttttaattttggcgttaactgaacacattctacctagcttgctctaaactgaagtgaagcgtaactcaggtatatatagctgctgctgctacttgaacattagctaaatccgattgatcatttcagtggcttaatttagtatatggttttagttagtagaaaattaagcgaaatcgcgatcgatgtgcccggcggtgacgggggcgacgctgttcgcggtgggggtgatgctgtgcccgttcccggcgctggtgccgtcgtgccggaacctcaccgccgtgctgccggagctatgggacctcctcgccgccgtctacttccacatccgcgacgagctccaccagctgctcgtccgccgatcgccgccgcacgacgacggatgatatacatgatgatttgatccatgacaaattcgagatcgatcgattcttccatatgcatatgttagatatattcgcgctaattaagttccctttttccttcgaattgatcgtgtgggtcatgcatgtgtgtgtgtgataaatagctcactcttgggtccttggatccggattgattgatgttttgaatttcttgtggagaaattggtaagctagctaacttgtttttggctagcttgtttggatgaataatatatactccctccgtattttaatgtatgacgccgttgacttttcgaccaacgtttgaccatttgttttattcgaaatttttatgcaaatatgaaaatatttatgtcatgcttaaagaacatttgatgacgaatcaagtcataataaaataaatgataattacataaattttctgaataagacgaatggtcaaatgttggacaaaaaaatcaacggcgtcatatattaaaatatggagatagtatttgattgggttatgtatgatgatcatctcactcgtaccgttggtcacgcgagtgcacgagtgcagctaccaatactgcaggttttgtttcattaattgttgaatgcttttacgtcctgattgtttcagcttaagattattataatctatattattaaattagattactttaagctgaattataataagctaatataaaataagctgcgagttgtttgtttctccggattattgaaggcatctaagggtagtgcgtcattaaccaccaataatatgaaaaaagcttctccaaaggagattattagattatagtaatctggcttacaaattataataatctatcataataatctacttgtttgtttcagcttactcataataatttagattataataattttaaactgaatcaaataggaccttagccttggttgcatctatctattgagtgattgagttatctggatcatatgatatgctatttggttagtttccgatggatgcggataaaaatatggatatccaaactttgttgctacactgctatccacagaacacaaaatgtacatcatcccgcttgtaggcctagttctatagcaaactttctcattttcttaaagagaaattgtatggttcttgaaaaaaatatctcaagataactaaattttacatttatattgttggtaccttgagataataaattttacagtagaaaatctatacctccgttaccttctgaagaaatagtaaaattacccttctttaatggtgctttagcctacaacactagcgcatgctgttaatattatttcaacttgcaaatagcaatctaaattaataggcatgtatttatgtcgcttcgttaatttcacatgtatttatacttgttatatcgatcgtatgtgttgaattcaatcggcatcatttagcctattatctaatggtttatttgaaattagctaggttttcatgtttcaagaaatatttatttccatacttgtgtccaatattaaatatttatttgtattcgaaataatatgtatttatttcagttattcatattcatttttgtctttaattaaaaatataagggttaattagatccacgccgctgtaactttttttttataaaatgcaattactatttgtctatttggagacatgtcattacaatttgaccgaaattacagatataccactatgtacatcttcaatgcaattataaaatatttggatcgaaattacagatatgccactgaaaatatgtcgattcagataaataccactgtaattcgtcgattcagataaattcatcttcttcctccatcttctccctccctttttttctcatctctctccaccacctcaacggaggggactaggtgggcatggccgccatggcgaggtccagggccccctcgttgtcgacatggactaggcggtgctgccatcatgtggtcacggcttggcggcctggatccgcacccctgtggccgcggcggcggcatagccaggcccagcaggtgatcccgagcagcagcgacgctagcaaaggtgcccccggtgagccctagcattgacaatagtgaccctagccgcggcaacgctagcgacgacgccggcgaagtccctgcattgcccgctgaggagacggccgccacacgtccagatctgctcctccccacgccaccagacgtaccgccgctccttgaccgcttgttattccgccagccgccaccgctgggaacattccgtggcgagatatgagaaaaaaacgaagagggggaaaatggaggaagaagatgaatctgacatgtgggtcccacgtgcagatgaggaagaagatggagatggatggaaaaagtgacggcattggcatgattccaattttgtaaaatttcaatggcacgactatgaataaacgaattgttatggcatttatctgaatcgacatatttacaatgtcatggattcaattaaccctaacaagaattggagctttttgcaacgatttgtgctgcggcaccatggacgaatggatgatgagtggagaacagagggagcgtccgtccggtaggctggatgggaatcgccggatcggaccagtgtaagagatgacagagattagtgagtggaaggaggaagaaggggtgaataaggaaggaggaggggtaatctggtccaattctgttttataattgcattgaagggatatgaagtgtacttgtatattttcaattttgaccaaattacaatgacatggctctaaatagacgaatagtacgtaacggtatttttttaaaatcgaaggagttataatagcttgatccaattacccagaatataaaaacaaatacggagcgagcattattcatttgtatccacactgttttaataggcttctggggaaacaaaaacttgccaggtctgctggaaagtgttgtgtattatgtaaagtttttttttcttttttttacaagtagtgttatgtgaagttcaaaatcccagcccacacgagccgagattgaggcccatgaagacacggcctgaaggtgacttgctcagattgttaggccctaaagtcagccaataggcagttggatgctgttatacttcataagtaggaaaaagtacaccgaaggtctcatccccacctgcaaaaccagatatctgatgtcttttaactaatcaaaaccggtcacaataggttctttggtggttttgaccccggatttatcctacatggaggatgagtcagcgtgggatccacatgagccacacatgtcaggatgccacgtcatctttctcccttcctcctcctcctcctccccctcctctctctctcactcttttcttttcttctctgggcaagccggccggcagctggggaggaggccactggggcgatgcgggagagaaggaggcggcagacaacatggcggcgacgccaacgacacgggaggatgcgcccatggcgacgatgatagggactgctctgggtagtggtgggggtgcgactgctcctcattctctcccgctcgcgcgctcaagccgctggccaccgccacgtccgccgcggcggccgcgctcaagaccctgcgtgtgctagccgccgcctcgtccccgctcgtcgtagtcatcgcgacgtccaaggcgacctccaagtcctacaaggcggcatgcacactcagtctcgccacatgcctcccttccctcccttccgacaagtgcctgaaggccgcctttgccgccgccacgtcgcttctctgcctcacggccggcgcgccgcccccctccccccgtcgcttcccccaccgatgtcgcggccctcgtattcctcaagtctgggtacaagctgtccaagaacacgacggcgacgacgaagacataggtggatacagccgtggcgacgacgacagggaggatgcggcggcgacgacacgggagaagggaggcgacggcagctacgacgcttgagaaaggaggtggtggctaaggcatcccgtgcgacctcgtggtcggaccgtctgagtggcccgggaggcgtcggcggcggcggcgcgggcgagctcgaggatgaagatcccgcgcggcgacgaggtgagcgaccttgacggcatcacacctgctgtcgatgacccctacctccccgtcgacgcccgcgcacggccgctgcacgcctgcaccgttctcgcctcgctatcgcctccccgggcccatctttggccaccgcggagctccgccgggaggccgccgtgctttctcactgcggccgctatcgccgccgtcgcggcgctgccctcctctcccgcctcgccccgccgaccggcctacaggtagagagagataggaggaaccgaggaagaaaagagggaggagagagatgatgtggcagcctgacatgtgggcccatgtgggtcccacactgactcagccgccacgtaagataaaaccagggtcaaaaccactgaaggacctattgtgatcggttttgattagttaagggacgctggatatctggttttatggttgggggacaattttgtaactcaatgataagttgagggaccttcggtgtacttattcctcataagtatttgctccacgcgctttgcattacgagtccatgttagtgttagactttagaatttgttgggctggccatgtaaattccatatctcttctggaccaaaaacctgctcgcctaggcccactgctcgcgcctaggcccagtgtaattgcattgggaaattgaaaagatttttttaaaaaaaggaagaataaagcgcttgaagtcactcgcactaaataaattatcatctaatgaattgaaagaaatagcgtcaaacaacactacaagttggaaactggcctggccaaattggctatgtgtggtcgtgcatccagttcaactgagattccaattaattctagagtcgatatagtgttcaccagtttttgaaaaatatacacatgtgtgtgcgtccaatgaattcatgtgtaccacattttgagaatttgtttgggcaatttgaaacatcggaaactaaattgatactagagcaaaactctacgtaccgtatcggttattcacccttaatatacctacaggtacagaaacacgaatacttactctactataaaaaaattcacggaaattttagcagcaaattgcaaggtttgtgtaaatgtatgaaggaggatatatacaaaaccaaaactaggagcaagcaaaccgcaagatgagatatttttgggagaaaattaaaccacaagatgagatctgaaagtcgctagagtccaactatccataacagttggagacttgtatgcctcgccaaccttgtataaataagatgcaaggccatgtaaattccatttctcttcttgctttccatgaatatgctgctggtctcctcagaaattctccaacaatatatgatgacgaccgaggcaactctaaataaacctttgtaccaaataaaatgtcaaatcgtacttctaacattcgggtattcatcgagggtctaatttaagcttagaaatttcatctgctctctctgatcataaccatttaatgttgacaaaattcaattaatctttcgaaattttaagatcataaaatataataaatttataatattattataacacttttctttaaagaaactatgcatttgagaaaactattggagatcaaaatcctaaaaggttggacaaaacctctcacaagaagtcaaatactccctccgctactaaatatttgatgccattgactttttttaaatatgtttgaccgttcgtattattcaaaaacttttatgaaatatgtaaactatatgtatacatacaagtatatttaacaatgaatcaaattatatgaaaataattaataattacttaaattttttaaataaaacgaacggtcaaacatgtttagaaaaatcagcggcgttaaatatttagagatggagggaatacttaggacaattcgcataagtattgcaaaaaaaaaaaatgcggcgttgagcagcttgtcatgagaatccaaacaggatcccatggcgaccgggacgcctaggcctgtcacagggacgagacgacgggtccagccagcaccatggccgtggctgttgtcgaccgtgaaagcgaggagagaaagaaaggggaaaaaaatctggccaataatttgatgtaacgtagtgccagattccatccaattattggtgaccctagaacggtgttttggcagcagaccggccgtagtacgtcacacgatctgctgatcttttcaagcccaatgcatggcatacactacacgcacaggctaagggcgcttatcaaccaaaatttgaaattttcaacattaaatttagagatttggagctgattttaaggttttttttatcgaagtttatttttcagcatttctttttagatcgttaagaacacgtatataaaagttttattcacaaattacctttcttttacaaatgtgccatttcgcttattccgcgaaacgatggttatgcaactagctcagtgactgagagcaggagaacaaataggattgaaaaaataagtaaaataaggtaagcaataaattaaacactaaactttttataaaacagaggcgtgcgtgggaaagacgaggattttttttctaattatcttcgaacgaactcaccatcaaaagcaaaataactcaagaatatgctactccaaccattcataaatattactataagaattttttaaagattaaaaacagggcgaaagattttccttatttacatttttagtcaaattttaaattttgaattacttaaattatggtcataagtactctctctttctaaatataacaacttctagcaattaaatcttatttcaaattataaaaatttctagcattattcataataccatttgtcttattaatcactttctcttcaaatttctttccatcttaccccgtctaccctcccaccctatccatatcttattatttattgaggggcactaaactattttcttctcaacatcaatctatgctaaacctataaatacttatattttggaacatagataatttggtcgaaaatgatagaatttccatgcactgaaataatcattgtcctataaatatttatatcatgtacaaatttgaatcatgcaaatatttaaatttgggaccgaagggagtaaactagttgagtttggtctccatggctatcgatcattgatcatggtcgtgattttcctcttgtgatgcgtgccatttgatttggtccatgatccaggaaaatattgtttgtgatggaacaggtagcacatgttaagctgcagaagctgaactcatgcatgcttgcttaattacctgttgattaatttcagatcttgttatcttgtgctcccaagtctctgcttagcatcattttattgaattattgttcaaataggagcaggagatttggttcgtgagctggaaagatctcgaaggagttccagagggaaatgctgccactatttttcagtaactccagatcattgaattatttattgcagagacctgacgacaagatgacatatcttgtggccaatgtagatcttgatatggcctggccccctcattgtgttgttgttttcaaatcacaaatcactctctggtccattgattcttttatgggatccctgcaataatttcagaaaatgaaacttctgtctgcaggttttctttcctaggctaagcgcttcagttgcactgcactaggacagtgctcactgatcagtttttttcttcacttctactcctagctgaaatgcttgaacttgccttcacgatctcaatcataaaaccaaaaccttatacttccttaaaaacggagtcatccgctcatcccctttcacatctcacatggcgtgcaaccatatccccaaaaaactgaataaccacgcttttactctatcacgctaccaacccatttccaatcgtataggccattggcctataaaaataattattgttagataattaaagtttttattaaactcaatcgattacattaaggtaatacaatttttgtgatatctgcataactaagatgcacacaagcgaacacacaaaattaaccgcaatagtaatttaatgtccgcaacagtaatatacgggtatcttattagttatataaaagtataacagcttgctttcacaattctggaaactcttgtgaaaatatctcggatcaagaaagcccctgattggagcacgcacgttctttcttgagttttcagtttggactaatgacaaaagaatttggccgattatcctttcaatttggaggactgatgacagggaattttcggactgcggttttaattttggactaactagatgggtacctcgcgtattgttgcggaaaaattatgtgataatatagtagatattaggtctgttcggtagtgctgaactgtggttgtacagccgcagcgctgctgcttccctagtatctttcttgtggtgggactgtggctgctggctgcaaggcagccagctagtagcgctaccgaacacacccattacttctaaaattttctttcttacctactatataatttttctttcatgtgtttatatttttttacctttatcaattatacataggttataaatgattgggttgtatggtgtgtcttttggagggaataaatgaaatttataccttttatgaatcatccaaaaacttaaaaacagttgaggtgatgtgaagagatgtaatttacacccttgatgaatcatccaaaggctaaaaacaattgagatgatgtgattttatgagagaaaagagaattagcattaactatacttagtggggatgaactttatatatatatatatatatataggatgacaaagaggtttgctcattatggcttccttattagtattattgcaagggagaatcagttgacacagagttagctcgtatgagtaatcggcgtcagattttgacgtatgtttttctgccggtgtttggtcgtcatgtcagttaccaaattaaaaagcgtcagttgcttctggtgatgggaacacagcttatttctttcgtcagactgcacgctactacgcttctattagatttcttgttagttttgcattcggcagaatggctgttgctgaaccttttgcgttttgttgttgccgtcactatccgctttacagatattcatggagcgaaatttgaagctgttgtatgtatggccatctgaagaaaccatatgtcatttttttgttgatacctctgcctaaaaaatgcaaatattatcttagttattacctaccgtcaatacaactaatgcaaaagccatgatatcataacaagatgttgtcatctgatcggagtttatcatttttgacatcttcatctcagctcgtattattatttaccccgtctttttttttcaagaaatggacacatagattaacggaaacgcttcccgagctcttaagggtgattactagagtaaatttcattaaatcccacctatttatgcatcaagttgcacgaaatgttaggtattttggcacttgacatataacctagctttatgattctaaagttttagaaaaccacacggtaaccattttgatatattcctatattaaaatagaaaaaagaatggatgtagcatttataggatggataaagtgctaataaatttgagaaatttgagaagtgattgtaactgtaaagtacggtatatcaaagttaaaataattattaatgtggttttgtgaaatgttatgaccttaatatctaagcttacgtgtcgcataccaaatttcctgtggatttgtgaaacttaaataatggatgtgattttatgaaatttactatggattttaaaactttctatatatgcgcagaatattgtttaaatttatttttcaactttataatagtcaattcactcatacgtacccttaataattattataaaataaggtcaccatatcaccaaacaccaagaatttagtgagaccagatatttttcatccgtccccatatttttgagcgtgtataaagtgaaacaaactgacagatgtttatgtgtacgtcgaaatccatgagaaaacatatgaaaggtttgaccgaaaacagcaccgtcatttattttttgttctcctggggttgtaataacatcgtgattctttctttcaaaccaaaccgtactaaaatagccaccgatttcgtcattctttctgaccaaagagagtttaaaaacccataaatttcactatggtcccaagagatttaattagcgaggaccatggtctgttctatactactattttgtaaaccttgccacgttgtgacgatctggaagcacaacttctcttcccctgtcattcggctccacgatccaagatctccgaaaatttgacatttttactctttctaaaaacttatttaaaatgtatttcctgaaaaaacttcaacaataaatgaacctcaacccaattaccaattacacaaactataaaagaagttgaaatgaacgtaactcaactggttagatttcttatggtgaaactagcccatccaaattcaaattatagatttaacacgtgcttgcatttatgactattttcttttagtgctagttaacgtatttgtcgatagcaagatgtccgtgattgcttcatcaatctcaagatatactcttttggagatacttatatagataaattacatgcgtatatgtttatagggatgaggttttgcgcgctgtgaacgttacatttgtagcaatgtttctggaaaaacaatggaataagatttggccggattcgaggggattccatcagctcacatgcactgttgccacgagagcgaatcctgaccgtccaatccggtggcgttggtggctagaaaattagctccgcagggcgtcttcgaggcggcagcggcagcagcagcttgcctgagctgacagatgcatgtctgagtatttgagtattggcgtttatgtgtgtacctatttcacgtaatccttccgtcgtaaagattgggctacatatctcatcgtagtaccgaggttgagttttttttaacgggaggagtaatcacgaggaaaaaaggtttgatctaaaacaacaccgccatttttagcgattattagcgctttcaacgcgtgtacactcatctctacaaaaaatacgcctatctctataggcataatttgtacctgcatatcataaaaaataattacccataagactaaaagaaacccataaatttcacaatggtccgaagacatttaggctcagtggaagaaacggctgggttaggaactaatttctcacgaacacacaacagaatgacttattaacgaatgattaattaagtattagctattttttttaaaaaaaactaatatagttttaaaacaactttcatgtaattttatttttaagaaaacatattgtttaacagtttagaacgagacagccttattactgtacaatgtaaggaccctggtctgttgtacagtatattgtaatcttgccaagttgtaacgatctggaagcacacactcttctctcttccccgtatcatccggctccacgagacaaccaacaagaccaaaaactttttttttttgggggaaaacaagaccagaaacttgatgagaaggcaaaaataaacccagaaaaaaaaacaaagggaaagatttggccgagttcgagtggattccatcagctcacatgcgctgttgcccgccccacgagagccaatcctgaccgtccaatccgcggcgtcgctagctagaaaattagcggcgcgtcgtcgaggccgcggcagcagcagcagcttgcctgagctgagctgacagatcagtcgtgggtggctcttggcgcgacgccgcgccccgcgcaccgtgcgccgtgcgcgtgcgctgtcgtcaccgcccacgagaggagatccgatcgcccgcgccgcgcgtgttcctgctcttcctcctccgcctgggccggacaaggcgggatcttgcggcgccttcctccaggggatctcgctcgccgcggccgcgcctcgctcgtctcgtcgcccaagaggtggaagaagaggtgggattttactcttttttcttttatcttcgtgggtggctctgggcgtagcgggtgggcactaattaaccaaagattagtgtagtaatcaccgggtgtttagtttactgccgccgctgcgtctgtctgtccgtatgtgcgcgtgtgaggctcgcatccatgtggcatctgggcagcggcagctgcagcttctcctccccactgagcccttttgtcctcactcgcaggtggcccttgccctttctctcttcttcttcttcttctctgctgctgctgctgctgctgctgcatacttccagcatccagggagtggctgcctcctggctttccatttgagccgccttcgattctgatctgggaccgaggagcaccccgcttccttccttcctcggttcttggccgtttctttggtcttctttgggaggtgcggtgatggagttctgcaagaattttgggagtcctgtgtttgttgttattgtgattgctggttcgggtgtgttcatttcttgctgctgatttcttggatgcagggatcggagaggggtgaagatgtcgggtgctgctctcgtcgcaatcgcggcctccatcggcaacctgctgcagggatgggacaatgccaccattgcaggtaaaaaggttttacttcccgtgtcgtgctagattggttatttggttgagagtttgtgagtactaggaaatatgaacagctgtcaattttttcttaattatcagtgttggtgtaccttctaaatttttcagattaatagactgctttagatcagatgtttgttgagtgctaattatggtcttctagtaacatgtctggtgttgttgtttgagtcctaagagcaattggcacaattgtttatcagcaaactggatcgcatgatattaatagtctcttaatttttctagatctgtactaatcttattgaagaaagagatgttctaatcataattgttagctattgtgttgtctgttgaatcattactgtttgccattctttgttctgaacacctgtaaagattgttctatccaacaagaaagtgtaaatgttaacaaggcacaattattaaacttcttcaggtgctgtactatacataaagaaggaattcaagctagaaagtgagcccactgtggaggggctaatcgtggccatgtcactgattggtgcaaccatcatcacaacattctcagggccggtatcagactggatcggccggcgccctatgctcattctctcttcaattctctacttcctcagcagcctcatcatgctatggtccccgaatgtctatgtgttactgctcgcacgccttatagatggattcggcatcggcttggctgtcacacttgtacctttgtacatctcagagacagctccttcagagatcaggggtttgctgaatacactgccacagttcagtgggtcaggagggatgttcttgtcctactgcatggtgtttgggatgtcactgttgccgtcacctgactggagaattatgcttggtgttctcgcaatcccttcgttgtttttcttcggattgacaatattctatctgccagaatcaccaagatggcttgtcagcaaagggcggatggctgaggcaaagaaggtattacaaaaattacgtgggagagaggatgtctcaggtatgttttgctgaaaattttgatgttcatttcacccatatttccagctgaccagtttaaaaacaatttctcccagattctaaactcatggttaatactagaaaacatgtgtggcattggtaactgttaatttcttgacacgaacttaacatatgcagaaatagtgtatttttgaaaaaaaagggtaaaagaaatcaaaatctattaagcgccttctatcggtgctcttttgaaaaagcttatgaatcttcaagtaaaaattactaagtacacataactacactaattcattttccatagaaggcagaacatggaatgtacaatcgttatctcaccaggtagagcccaaatgaggtgtcccaactttttgctgagtcctaatctggagaaaaataatcaggtgatctagatagacatcgccctcttttttttttttttggtaagggtaactctagaatttggggggtgggacctgctggtataatgtggatgtgggccgacccacgggtccttatctactctagtttaactaaatgaactatattttgcttttgagattttaaaagtgaaattaagtccatctagttgacctagagtgggtcaaggagccccacagcggccatgcctaacaacagtgattgttcagaaacgttagtaatgatttatccttaagttcatgctttcctcaaactaattacataatacatgtgtcaacatcaaaataggcatatgctgttagcaagtggtttctctattttctcctctacaacagactaaatggacagtattcggttggctgagagcataatattgctgttattttaagttcatcgaacttcgctgtaagctggttgtccccagctgcactatgctagctttctattaaagctgggcccttatatttctgttatttgtttctggcacaccattcatatttatattgctgctttattcatagttactacttatttatgccaatgtttataccaatgtccaaataaaatcatgtaatctacgtgaaaaaataaagttgcataatcattcaaattatcaaattgcgcaggagaaatggctcttcttgttgaaggtttggaggttggagctgacacttccattgaagagtacatcatcggaccggctatagagccagctgatgagcatgttgttgatggcgataaggaccaaataacactgtacgggcctgaagagggccaatcatggattgctcgaccttccaagggacccagcattcttggaagtgtgctttctcttacatctcgtcatggcagcatggtgaaccagagcgtgccacttatggatcctatagtcacgcttttcggcagtgtccatgagaacatgcctcatgctggaggaagcatgcggagtacattgtttcccaactttggtagtatgtttagtgtgacagatcagcaccccaaggttgatcaatgggatgaggagaaccttcatagggatgatgaggaatacgcgtctgatggtgctggaggtgactatgaagacaatgtccacagcccgttgctgtcccgacagaccacgagcgcagaagggaaggacattgcacaccatgctcatcgtggaagtgctctgagtatgagaagaagaagcctcttggaagagggtggcgaggcggtgagcagcactggcattggtgggggatggcagcttgcatggaaatggtcagagcgagaaggcgaggatggtaagaaggaaggaggatttaaaaggatctacttgcaccaagaggaagtgccaggatcaagaaggggctcagttatttcacttcctggtggaggggacgctcctgaaggcagcgaattcatacatgctgccgctttggtaagccaaccagcactttactccaaggatatcattgaacagcgtatgtccggtccagccatgattcatccatcagaggcagctgccaaaggttcaagctggaaagatttgtttgaacctggagtgaggcgtgcgttgttagtcggtgttggaattcaaatccttcaacaggtagagatgataccaatttcataattcttttttgtactgtccaacattgacggtgtttaagatttgtgtactattaagaattcactaattccttttatgttctttccttgtgcagtttgctggaataaatggggttctctattacactccacaaatacttgagcaagcgggggtggcagttctcctttccaatcttggcctcagttcagcatcagcttccatcttgatcagttctctgaccaccctactgatgcttcctagcattggtttagccatgagacttatggacatctctggaagaaggtactaacttgtttccttggtttgcatcatcttagtactaccaaatataccaaacaagaaatgcacccaagttagtattaattacatcatacattgtttcctttttaggtttctgcttctgggcacaattccagtcttgatagcatctctagttgtcttggttgtgtccaatgttatcgacctgggtacagtggcccacgccgcactctccacaatcagcgtcatcatctacttctgctgcttcgtcatgggattcggtccgatccccaacattctgtgtgcggagatcttccccactagggtccgcggcatctgcattgccatctgcgccctgacattctggattggtgatatcatagtcacctacagcctccctgtgatgctgaatgccatcggcctagcaggtgtctttggtatatacgcagttgtttgctcgattgccttcgtgttcgtcttcctcaaggtccccgagacgaagggcatgccgctcgaagtcatcaccgagttcttcgctgttggtgcaaagcaaatgcaggctacaaaggcctaattcttcagcaactctgctttcaatctttatataacactgtaaattggaatctgcaagatcacaccatgaggctggaggagctttttgagttgtaaatgagagaagaggattgctattcatgctccttatgcaagggaaaagagttcattactggcacagggcagctgtaaagtaggaaattttcatgttattcatgtccacttcttgtttatttagtactgtgttaggtaatgttgttattcatcagtagttgctgctagggatgttcaaaaataagcttgctaatctgattttgagctactatgttggggttcataataaagtaaattttctgtgtcaccttgcaagcttttgcactttgttgtaaattgtatggggaagtttatttattaatggtgccgctctaaaagcaactacagaaggctctctggtgtacaaccgatggtgattcttttgttcagattttatgtcatcacagttacaaggagtaaaaatgactgttggactatgaagaaacagtaaatattttaaaacactgatatttttgcagtgcatcaacaaattacaaaaaaggattggacttgtactccatttcattgtgaaaaaccatttcattcttcatactaaaaatatccacaaggttttctcattctttgatatcaatatagggcacaacatctagccagtgtaagcttactatttgcacaagaaaatcagatggcagcttgactttcaaaatccatgtctccatgtctaaagcatagcctttctgtccatcttaaaaaagtatatattgaaaaactatacaaaaaataaagctgagtataagttggctaaatgtttatgaacttgatctatggtcctctcttcaaagtactattatttcttgcaaggggagttgcctgggaagttgaactttttcgtacacctgttgctgctgcagaaaaataacattaaagaaatagaaatagcatttataaaacatggaattaaaaaaaggcacatataaaaactagggtttaaatagctttgggatttgggggttaatactgtaagttcagtaaccactattcaaaactgatggttcttggttcgctgagcaatttgagtcacatatactgtatgcaactataggaattcaagtgaattcgtgtcagactatatcggtggtgtaataaattgataaactgccttaccatgttgtctcaggatttagctgattgtcaaagcaaaataaaatttttaaaaaggttttacccatctacagccaactttgacagaaaagttcagtatactgtcgatagcatactgtcgttgtaagcgtcaatagcttactggtttggggctttcccccaatccatctcgacagcatactgtcgttgtaagcttcaaaatgtaatgaaccccctcttctttcttaatgaaattggttgactgtatctttcggccgacccggcaaaagaaaagttcagtatatggtatccctgtttgattcatgtccacttattcagttcaggaggcaagctatctgtataactactgctgacagattaagatccattctaccatacatcattgccttaaaccatacttcacctgaagatctagctggggcaggatctcttggtttaggtcgcaagcttgatgactggccagctttcggcaatgtaagcttctggacacggttcaccgccctagtcctgcatgagaaatagcaagttacagataaccagtggaaataaatttcacattatacaaaacaagtttttttagataatgacattatacgaaacaagtatgcaataaagatgtcaaattcagaaaaaaaaaagagttagctagtataagaacaagattggaattactcacaaccgctctttcgcagcagtgttggatgttttctcttgctcttgatctgctacattgcttactgaactatcagcttctgcacccatggaaataccatccgaagcatcgcttaaccttccatccgagtcgacatccgcaaggccagaaatctcaggatcaacggagagcatggacccagcttcagattgcctgtcactggtgtcggagaagttatcaagatcagaagctgccccactgccaacacttgtgcccttccctagggatgtaatgcccggggaagaggacgaatgcttcaatacggaatcagcttgtctcgttggcttcaatctggtgctactattgagtaattgaagcctgtcgatttcctcatccttctttgaaatggtatctttcagaagtgaaagctgcaaggagaacattacaaaacaatagatgtaacagtatttttcatggtgaattactattccattgcttacatcacataatgttttgacattcccgaacaatattcttaaccttttgccatttcaatactgagaccattatgtcaagagaagtcagaagtgacttgatgattattgagaaatttggttacctgatccattaattctttgacatcttttccctccttcccctccttattgctcctagcaacaccaagttccaccccagacactcgttccgcaaatttcagagtacttaaagtctctgtgtaagatgaaacatctgggttgacctgcacaaacattagggtttttgcatgcccacctgcatatcaaactatgcatgtcaatacaactccgtgtatggcatgtaaaatagttctcaagtgaagcagaatacccagtgaagtctgcaggacttgtgtgagcttgctatttctgtatggtacatgagcattcttttgtgataaagaaaatataacatccccaagagcagccaaagacttgttgatgtgctgtgcttctttgagcctgtcccctgtaactgcagagcggtccaccctctcacttccagcaaggtccacaagatgtagagcgccacgcaaagtgtttccagtcttcagatcttggcctcggacatgaatggtcacaacgctgcaaaaaaaatatgatctctagtaagaagggttagtcctacgacaaaaaaagaaaagagaaaaggcaagtaaattacctgtgagacctgctactcctctcattcaaagctgttgcactcatggctctattgtcatgccctgtttgcattagctcgattacatgagaagttgaggtgacaggacacattgttgcatcaggaacagcaagtccattgggttggatggtgttctggatccctagtgtgttggaagttaagaaaaaggaggatatttcttcacatcaattcagtctgcaaaaatcaatgtatggaacttctcaagcaagatgatcgcactagaatctgatgaaggatggccatcgtgtgtgtacacaataaaaaactgcaaattttattgcagatttaaattctatttggtgaaaggctacactaatgcaagtctgggggaaaaggatatttcttctgcacgccaccactgccaaggagatcacggatttgctcattgtagatctcaatcatctgaacaccaagttcgtaagtgattgtgtctctacggtcatgagaaatattgaaaaggtcatttaatgccctataattgactccccattccttctcagttgccttttcaggtcccatctgagaaattgatagaaacagatcgttgtaaacacatagtgactgtagagaaatcttctggcacgcaaactgaaataaacagaccaaatgtttttgccctgagcttcagcgtaccatagtgtatgtttttcctgatccagtttgcccatatgcgaaaatgcagacattgtagccatcaagaactgatctaattagtggctgtatgtccttgaagacagcatctattaacaaaataagagggataagagaattgatgtatatgacatacactattatgggatataattttttgaaggatttgttgaactaatttgatgcaatagcttcaatggaaacccaacagaagattaagttgtactgaccacttatcatgtaccttgtgtagtgatagggccaaaaactttgttaaatgtgaaatttttgcccccttccttcccttgttttgtagggtttgatagaactagttcaccattgtccccaatatattcaactgaactggacttgtcatcctccccaggtcgaaaaggtcttatccgacaatatactctgatgtttcctgctcagaaatactatgccaaggtgatatcttttgacctagataaccagacaaaatggactgatgattgtagttcacatgtaccttttagttcctggatctcattgaacaattttctgttttctgcaagagctccatgatacttttctgcagtatttgttaccaccttaaggctttttcctgttgaagattgcaactggtaatgttagttgcaatccatcgatgagaaaagaagtatttgtatatgaaacccacaagtaatcacaaggttaattcttaccaaggccagctagttcttcagaccacttgttttgacaatttaagatttcatgcctaacggaaacagaagatagcttcaaatcctgatgaaacacaacacttttgactaactgcagaatttaagaactccgtaaaatttgaaaaggaagaacaaaaggaagttatttttctaatacctgaacattctgtacttgcaaacttacaaattgatcgatcaccacttctttctttttccagaattggattctagtttcggataattcctcaagttctattcttctcttggtagaatcgtctaacataagctttacttcttctatcctctgttccaactccttacttacttgtgcagccttagtctctaattgctgactgtgtgcctcatgcaatctctttgtttcttcaagctctttcttgagttctgaaattatactgtcattgttttccttgtctgtgagaagcctggccacatcttccttcttagattctaacaacctgcagctctcctcgtatgatgatcttaatgtttccgattccttcttaagtttcaaaatggtattgttaccatcttctttctccttcatcaacctcattatctcagccttatccttaattgaccttgctgcatcttcatccgcgattttcttcaattcagccttattttccttctccttgatagacatgaacatgtcttccttctgcttcatcaaactaattatatcttccttttcttcaagcaacttaattatctcttccttctcctttgttaacctaactactatatcatctttctccttaattatctcttccttctcctttgttaacctaactactatatcatctttctccttaatcagcctgtctttattgtcatctgccatttgctttctgtcctcatcctcaccttttcccaagttaaccatatcttccttctccttcataagtataattatatcttccttttcttcaagcaacttaattatctcttccttctcctttgtcaacctaaacactatatcatctttctccttaatcaatttgtctttaatgtcatctgtcatttgctttctatcctcaacctcccctttttccaagtaaaccatatcttccttctccttcataagtctaattatatcttccttctcctttagtaacctaaccatctcttccttctcctctgtcaacctaagcacaacatcattcttctccttaatcaacctgtctttattgtcatctgtcattttagttgtaccctcaacttcacctttttccaagttaagcaaatcttccttctccttcattagtctaactacatcatccttctccttcaacaaccgaatcatttcttccttttccttcaccaatctatctaaagcatcatccttctccttaattatcctatatttatcttcatcttctattcgttgtgtttcttcagctttgactgttttcaagttaatcatgccttctttctccttcagcaatctaaccatatcttctttctcctttagcaacctaaccatatcttccttctctctcagcaacctcaccaaatcctcattttctttcatcaatctaacaacatcatcctggtacttcattaacctttccatatcttccactgctagttgccctttatctccaaacttgtctttctccatctgcataataagagtaaatcaaaattatctattgcttctcaagaactaatgatttaaagacctgtcatcttttacagagtgaacaagaatcccagtcattctgttgacatatcaatctcagagaaaaataagacaaagggaattgtatcagcattgccatttgtctgccattttatctttttaatatttattaattaatggtgacaggaggatcttcaaaacctcatttaggccaggtgaatacttcacttgaagtacacaaaattcttgcaacaacccaaagtcaagatagatggctcagagaagttgctggagtttacatgtgtttgcccacttaccccaccagctaacacctctagcactcttatccttgactgatacttctcttcgcgagctttaatcaggttattttgctgcagacaagtaagaaatcacaaaggactaatctggtataagaacacatatagaaaatatttatcttacgttccgtatatgcccagcctgggtggaaatgcgcctctcaatctctagtatgaccttcctcagcaagcaagcaatgcgctacaatgaaacatttacattcatttgtacaagggaaggtgttaaaaacatgaaatcacttaaatttggaaagaacaaactaactgcatttcttttctgagaagcctacataaggtatttgtccattcttcctctcaatgctctcatcaaggatgctgttgaaaacacccagaagtgactgcgtaggtgcattctgcaacaagccagcattgggtgacaatgtaaaaacttttctaaagtaaaacatggtatctcattactagtagggataattagatgcacttacatccaagctagtggatttcagcaagtctgaatatttgccaccgagctgatcagcatatcctccttgcttgagctgaaatacctgcaacggcgaatacggatcggatcctaacacagggctggatggctctgaatacaagcaaaagacaagaagatgtctctctctcagccagcaattggatgattcaccatcacaaaatcagttgcaattgtcagtttgtccactccaggtatacctgacataattgggctagtgagcatcctttgcagcttggattcgacgcgcttccggcccccttcgctgtcgcatctggtcaggaaaccagggttccggtggtcatcgccgccgcgcgatccgaaccgatccttgagggcaaggatgcagttcacaacagccgtcatttggccctagatggaacagtgtctcaatcagaaatgggtggggaatttgtcaatttggcatggcggcaaaaggggggggggggggggggggcagcgcgattagggcaagaaccctctcgaggtcggaggcgctgaacttggcgacgcccatccgctcgacggcggcgcggaacctgccgacgttgtcggtggaggcgtcgtcgaggagggcccccgggcagagcctccggagcagcgcgcagagcagcctccccgtggcgagcgcggcgcggaggtcctcgtcggtggcctccggcggaggcggcagcggcaggtccgggaacagcgccagcaaccacccgacgacgtcctcccgccgcctcgctgcaccgccaaccaaatcaaaccaagaaacccaagaaatcaagaaagaaagcgttgaatcgaatcaagaaaccaaagggagagagaaagaagacgtacatgggtcaggcgaggcggcggcggcggcggcattgttgctgctggacatggaaagcgaggtgaaacgaagcgatggagacggccatgtgggggatttaagccgcggcgcattcgtatcggagcgcggagaggtgaggtcgggagggaaaggaggcgcgcgggatgcgtggactctctctctctctctctctctcgctctctcgcgctatttttgggtggcgcgcgggaggagacgacgccggcgagacgcgcgcgggcgcggcggctggaggaagaagacgaggtgagacgagacgggcccggcccggcccgtttggtaaaccttgggcctagcccaacagagccattcatcggattattggaaagaattgtttgctctatgctttgaaaaatattttttcataaaagaacttttttataccgtattacttagaccacttattttaagctatatctgttagatttatttatttttattttattcccataatcaaggagataatataaatcaaacgggttccttttttttgctacaagctttggtttcttgtttctagactatacagcaagtaaatggagaggccgcaggtacttgttcatttgcatagtcgggtaattaaccttttgtaattcgatttttttcacttttagggttgcgtcagtatgggccaacattagtttcaatccaaaccaatattgttaatgggaagatttgacaagccaaatgttttggtacagtacggttgtttggattattgtcaatttttggtatgtgtttgacctaatgtttgctggttctctgtccagaatatctgaccatttattttgcatggcaagttcgggcagcaaaccaacacgtcatacactgtgtttttggctgagcaagggagccaaatcctccaatgtgctcaagtgcgggggaaaataataatcaaattttagggtagtgaacttaaagcatgtttagtttgttgcactttcagtcttaccaaattttgacattaccaatttttgattgggccacaaactaaaagcacttcaaccattacaaacttaccaatttttgataattctagaagctccctctcttaaaactctactatcataacttcgttttggtaagtaaacccaaacaaatgtttcatctgacacaactctagctccacctccatctctcttagagttggagtccaatcaaacagtttcagctccacttaaaatcaagtggagctggctgaagtgcactcatagttaccgatctatagatggataagaggatggactgccattcggtcgaacactggcggtctatggttgtggggtctcccaatacacctcgaaagccaatccggaccctagtgatgctaatttcctgggaaatctagtgcgagcgcaacacaaggatcactcaattctagcaaaaaatcaaagaggagggaagggcatgggttaacactagggacacaaccctgcaagagctaggtattttgggagatatcacttagggaccctccttttgcgggctagtagtcttcaatctggcactgtaaataactttgtataccgtttgtttacttttctcctgctctatcaatatagaaggcaaagcttttgccttttcttcaaaataaaaaaagcgcactcacaacccactctcgacccaactcttgaagttaaatttaggagttggaatcctaccaaacgagcccaaagtcaatgctaacaaattttggtaatgtaaaaatgtgccaaaatttggtgtggttgatttgggcaacaaaataaacaagccataaatataaacatgccaattaattctcaatgttaggatagacgggctacatttcggcccgagagacccccccccccccatgaataatcgaaaaagaaccggcctaaatccacttattttgatctactcaattaatttcctagtaaaaatgtttatcattggacttcacgctcaatatgtagcgatggaggaccaatcccttctttctataaaattaagacccaaagctgcattctcagttcgtcacgttatcaataatatatcagccgttcgatcaatatgtacatcagatatacactattggatcttcatttatctacgagaaaaaaggtccaaattgctgggtcggcccagctagactcatcttcagtcccgcacatcctccaatcggcccagtaagactgcggagcccatctccagagtagcggtccgcgcggcccatcatccctacacgaagaaccacggcgcgtgtctgcgaacgaccttgactcatcgtctcctcggcctcgacttgctcttaattggtccgattccaaatatctaaccagcgatcatcttctgctcaccgcgaatgaccaccatctcccatcgacctggcatggccgattcatctccatcgtgaatcgttctaaaccatgtttaatgagtggtttatccccattacaggatgagcatctgaaaagacaagactcatcaaagtaccctagcacctctaattcatcctctaaacatgcacatcaatggcaattaattgttgttatatcaacatgcatgatgcacctggaaccggcccatcgagaacgcaaacggtccacaatgtacttataaatttgtttctcctgctgaacacactcatctttctatgcatgctcgcactttccttcacttaccctgttcctccatatcaacccattagcaccggttgaccatgtatgcacacatacatctttgctataggctcgagtctctactgcctcaaccttttttcgctcatccatgccaatagtttatcaactatacatttctcctccaatagagcaactgctaggtttggtttcagcaaaacgccatagccccgagaaggcttctctaattattttgtccacttcatgtttcacatataattttgtaagtataccttttatttgtaggattttaggtggttgaaagagtatcaatttttcatcaacgcagtcatgtgtacggccactaagcgaatcatatacaggctacccatattgcaatgtattttaaataaattgttgcttcttcctccgtttcacaatgtaagtcattctagcatttcccacattcatattgatgctaataaatctagacactccatcaatatgaatgtgggaaatgctagaatgacttacattgtgaaacggaggaagtaataaatagacaattcctggtgttatggctcatattttggttattcttctaagcccgcagcaatgcgtgggaaatcaactagtatataagtatagctaaagcaaagccactctttgagttggttagtagggtttctctttccattacgagtggacacctataagtagaatttacgagagctagatgattttattttataaccggtcaaagggggtgagaggtttgtcttgtccccttcctctgttcttacgatgttgcacatgtttcatgttagccatgtgcatcattgatgtaaagtcttattctcgcattaatccaaaatataaagaatcttcccaagacatcgttagcaccaggggcggaactgggcctagggcagcttgggcccaagccctactcgtgacaaaaatttagtggactagtacctacttatttttttagattttcccaaattctatagcccagccctactcgtctggcctagcctcacacatggcttgtttcagcccccacatctctcagcccaataactagcccatcacagcccaatagaagccaaccctaatcccacctcctctctatcgcacatcacaccgcatcaccgaacaagatgaatgatgaatggatgaatcactgcatgatatgctatattgagcgggatgtttttactagcattgaagatcgtcagattatagaacattatcatgctttgaggacgcgcaagtacaaattacctagaggtatgtcatgcattgctttgtaatctacaaataattaagttctcataatcacttacattatataatatcattttccagattcagcttcaggttctctaccttctgttgatgaagagtgaaaattatgaagatatgtcgtgttaggtactctaacaaaattttagtctactcttgtacttattctatacttttattgtacttcggtgcatatttagaaattgtattccagtcttgcattttttttcgtgcttgtactgtacttcctcgtacgaattgacattgatagttgttagccttcaatttgagccctagacgtgtcaagatcctggctccgccactagttagcttgtgaacaatgccaacacaggctgattcctccagggttcacaaaaatgaacccgctcacaaaaattggaccaaggcggttttcggttaatcggtttccacgaaaaccattgactcatggtaaaatccgaccaaattttgtgaaaactgtataatctagtttttttttaatttgactagaaaactgagtgatttgtgtctcaaaccggcccgagaagtcttgaggtttttgcgaaaaccaatctgtttttgtcggttttgtaaacctcgaagactcctcagacatatagctagtaccaaggctactgagattgagaccaaagggagaaagagacccaattcaagtctgaagaggaaacactctggagaactccgaaccctagctagctagctgaaggctacattgctctatcgattcaagatcgaccgggacagaagggaagcaaaaaaaaaaaaaaaatctcatatctgaaagcgtcaacggctgccgcgtcgataagccggtactcacagtggtgtgtgtcaggtgatcttggactgtatacaacgtctgcccttttgccctccaaggtacagttcagggaccatctcataatgcagccagtgaatagctttgcaagcttactgaagagcagcaaaggttgcattgctttgatgctctatccttagctttggtcctacactagggctgtagggaaagtaaagagatgacaagagagaagagtagtagtagactagtagtacaagtatgagagagattgagagaccatctgatcatgcaaaagcttatcttatctcctgtccctgaagaagccaaagcatatggataattcatagccctaattaagaattcaaaagcagtcttttcttaattactaatcaagtactgccttttttttaaagaaaataatcaattagctttggtttcctgcctacttgttgctgaaccggctgcctgaaagcattgcaggtctgcatattctataccaccttgtgacccaacagctgattaaattagcatatctccctaaactcctagtgatggagcaatttgttggtcagtagctgcaactagtggaatttttcagcgattataaatactgcaaaggtggaattaaagctggggagttaggcagtggagatggcacttctaactaactcctgctctgcaatgtgagacatgcagaggtttcaggcaggagtagccatgaaattaccatggctttagttagttagctatacttaattatctgccctgattagatcttgtttcagtgacagttgactcatcagcatgtgtttgccatgctgatcagaaattcagaatgatcactattttcagcattgtgtaaaacttatttgaaccagacgattactgcaatgtacttgtgaagcagagcaccaataatgcattacttgggaaaaagaaaaagagacaaaaagcagcttcatttccatcccctaataataattgtaccaatgaactgcaatgatgaatggtgatttttaaatgaaaatatattgcaacaataattcaaaagccaactgacggatggaccgtactagctataacttatctgagatgatttggcagagcattatctgtagagagaaaaaaaaagaaaaaaaaaagactctagttagtgattaaaatcaaagtgctcttactttcattaagcactactgtgtcttagagctagacaaagggataaagggatatccaaaacttattacattgtgctttattattttcagctgcacaatatcgtatagtcgactatcagaacatatgcagaccttcatatatttcttatattctagtactatacattatgcagatcgaagaaaaatagaatatggggtcaatcaagcatgcaaatttgtgctatactgctatgttggcactctaattcggagagtgtgtgctaaatttgtagcaatttcacaacagcaccatatgctctctattggtattctactactattattatcgtcaactaggaagtagcccgcgcgacgggtcgtatgataatagatttgagatacttataagagcgaagtattaaccggagaacatctgccataatttctcccaaattgttttcgtcggcattaattgcttttacaattttctaacctattagctttctattatatcatatttaagtaatatctataaacaattatttataatcttcttcatcttttgaaaagaaggtaaacttattttctttagaaaacatgtcaacgaaagtaaaagtaagtgtaaaataaaagtaagattttttttgtttaattgcatacctattatcatggtttattagaggatgatttgggtgggacatgaagctccactaaattgtatatagcctagtatgattgacataatttgagaggcagtctatctatgaacatattatgtagagtgggtaagaggtactacacaacctaacataaatacgataacgacgaaatataattgtacaataatatttttgaaatgtgatgtaccatgaatacatataacgatatatatatatctaacgattagaaataatggttccaccggtttaaaaggcataggaatattccagagatgtagcttaaaaattatggttgttttaatatccaacattattgcgaagtgaacgtagctcaactagttagtttccttgtggtggaactttcccactcgggttcaagtcccaaacttgaaatttttttcagtggtagacgacgtatccatcaacagtgaggcgctcgtggtgacttcgtcaatctcaaaatatgtcggcctaatctctcagaggtcctgataggagtagggtatgcgttcataggggcatatgtactttgtttctcgaaaaaaatatccaacattatttgttgtttctcttttagtttaataagtttaatagataaaaaagatgtctttgtttctaaaaaaaatatccaacagtatttgttgtttcttttttagtttaatagataaaaaatagggaggtgacgaacagtgttgtgtgcatgtgatggcaaggaggaggtggaggagatttttttttctaattttttctatatgaattaagtgaaagccgatgatggggtatttcattttttaagaatttctaaggttctttctgttataggacgtgacacatggcaacttaagattttcttttaataaaatagatctaatagtcaaatataatggatgcatcaatttaattggtttttcttagaattttaggagatgatatatggtcatttatgagtgctctggagggcgtttaattgtggagggcgtttaattgatttttgttacatacagtgatctagtataatataatacatatgttcaattaatttttcgttgttgtttagttgtcaggccacgatagggtcaacctttaaatgatgtattttaaattttatatagtaaaatatagctaatgtgatttttatttatttattttattataaataaaacaatagctatgattatttttattttatgttagttaaaaaaatagaagaggagataattgaattggagaagagaggatgagagagttataggggagggtaaaggtgtacgtaaagcaggatgggaggagattattgttctcaagataaatagaatgggaggagattattgttctcaagataaatagaatgggtcctagttttgagttgattattagaaaatactttaggtattgtatttttaattaaactacttaaattgttctaatttaagtgtttattattaatcaaaaggtcttaaaatctatttgatgtttttcttaaaaatgtatggattagtgaacaatagctaatgcatagaatatgtatgaccaaagtaatgattttttttaaaaaaatatagttaacttggttctttaattttaagttttatactaaataatctaatggtgtacacactacaacaaaaaccttatgtagaggctcttttgtagagacaattttcaaaacgcctctaagttttgaagctctatagtctaaagacactttttagagtcacttttaaaatcgcctaaaatatttttagcatactttgttaaatttatcttatagagacatcttttcggcactttaaaatttgcctcatatgtaatggcattttcttaaggcatttaaaatgatgtaaaggcatttttccaaatattaacatatataaagtaactagatataagtaacaaaaataacatatttgcatgtaattatatgaggttgagatggttagtgcattgaagataaaaatgttcaactcaagaggtcatgagttcaaagattgataagggataatatttttcttttttttttcatattgatttgctagttgccgcaacatattaatgcctctacaaagtgcctttatttgcatagagacatcttataaaatgcctcttagttcatagagacaattcaccaaaagacacttatgagacactcttcaaaatgtctctataacattgtaaagacattttaaaaatgtctctatagtgttaggaaaatgtctctacaaggtatatttgttgtagtgacaccaataaaaagttagctatatgatttagatagtatagttgtttaaaatttgttaacataaaatatttttttcatctaactaaatgaggaaaataggagagaaaagatataggtgaggaggtacatacgcacaatgggtctaccatatatcagtgaaaatcgacaaccagatattttgtttattctcataatttttatgatttttctaatttattaaaatgtcacgtggcggcgtagaattgtgtgtagaagtactacatggcgggtttacagaatgtttaatgggcaaagagctaaaaatgcttccatgtgatagtttttaaatgaaaatatagttaatatcaaatgtagtcgtagtattttccctgtacacatctaatttagataagtttattagggatgggtggatgtttctcgtatgtataaagattcgagtagggaagaactgtgtgcagtatgtacatacccgggagattttatttttttctcaatcatggatagtagcacgtttatacatatgataattttttcagtttttttttgttgagcagcacgtatgtacgtttctctcgtagcaattaggtgggaccgtggcatggctaatccttcttctttttttcaatcataattacgtattttgttcctttttttcgcgagtagcaatacatggaagtacgtatacatacatgtatatatatacgtgggatgtatttttaaataaatctaatctaatggtttaaaaatagtgggtccactgaattaaataaaaatcgatggttggatgtttttcttttttctcataatttgtaagattttctcttatttattagagcgccacgtggcagcttagaagcatttgtaggagtaccacatggtggtttgagagtgtttgtagaaagtttaatagacttttagcttagccaatgagctagatcaaatgtagttgaagtaggagatataggacattggtgtcaaaataatatatttgatcgttaattttcaaataatatataaataaataaaaccataatttagtaatgtcacatgcttttttctaccgtacggagcgagtaacttttaataatactaatcagatatatttttatggctcaaagcataaaagcatagataatatggaattggattattagtttgggaaagaataaaagaaaaaaaagtacgtacctatttttgggaggggctgctatgtacggacgtacatacgtgcagcgatgtacattctatattgtggaaaaaataaatggtaaattttcaatatggatctaatggtggaaaataataggcccaccagatttaatgaaaaccgatgggtggcagctcagtagcgtttgtaggagtaccatatggcggtttgaaagtatttataggaagtttaatagacttttagcttagccaatgagctagatcaaatgtagtcgaagtaggagatataggacattggtgtcaaaataatatatttgatcgttaattttcaaataatatataaataaataaaaccataatttagtaatgtcacatgctttttttctaccgtacggagcgagtaacttttaataatactaatcagatatatttttatggctcaaagcataaaaacatagataatatggaattggattattagtttgggaaagaaaaaaagaaaaaaaagtacgtacctatttttgggaggggcttctatgtacggacgtacatccgtgcagcgatgtacattctatattgtggaaaaaataaatggtaaattttcaatatggatctaatggtgaaaaataatgggcccaccagatttaatgaaaaccgatggctagatgttttgattttctatagcgcaatgtggcgacctgagagcgtttgtaggggtgctatgtggcggtttgatagcgtttctaggaattttaatggacttttagtatataatagatagatagatagatagatagatagatagatagatagatagaagtaatttcaaccgttgatttatgatttctgagttccactatcagtaaaaaaaaaagtattctgccgtcaatagttgatgtgatagcatgaatagatatggtccaagtttagattgattatattatcagtagaaagcattataaaaacatctcattgcacaagaatttacagaaatgttcaattgatctatgagacatcacatatcaaactcttttttttaccttcctaaaaaaaattacatgtgtgaagaaatctatgttccccatcttgagaaccgactgattgtgattatgttttcttcttgtgggctgaaaaagtgtcaataatgcaatttgcaggcatgaataaaacgacatagctttatatcatctctttattaagaaggtccctatccaaagaagtgacactgtcttttcctacaccatattttttataaaaaaaatacatgcgtgtagtgttctaacacacgatttaaatcaatggtccatgactttctcacatccttttgagcttttgactgcttgccacaagcgtgtacgtgtcttctctaggtccatcatatttttcacacttgtgcaatttgtcatccttaagccctaagaaacttgtagtatgtttcaataattagttaataagaagtgtagtagtgtcctgataaactttatatttcaataactgataagaagctttgtgcaaacggaacttttatagcaaaccgtgcttagtagttatgggcatgcatatacattccaatagttcaatgtgctctttagtgtgtgttgggaattaatccccacgtacaataaacaaagcgacagattaacatatgattaattaaatattaacttaaaaaactttaaacatggattaatatatttttaatgtaaatgttctatagttttctttttttaaaaaaaatatcattcagcagtttgagaagcatgtgcgcgggaaatgtgggagtggaggttaggaacctcaagaaacgaactcaaccaaaatagaaagagtccatcctttatggcctgatttttgtattgagtaacttagacagttaaaactatgacaatgcttaaagaggctttcgtagcaatcaagcatgaggaaagaaagagagatcttatggctttcatgactagaacaacatatggttgaagggtacacaaaaaaacttgcacctccctttctctttgacaaaccatatatatcactcaagtcgcaatcataaacttttttgtcagtttctctttcttggtgagaaaataatataaatatttacatatgaaaatatattcaataaaattaattcccaaatttcccccttaataagtatatagaataattaatttataacatatatataaaaaagccagaaggcaagaatgtgcacttggcatgccacatggtgccatggacagatggaccaatgccaagtgtgcctcttgatttggcaacaagtgtcgtcccagctagctaatcacatccaaaccaaatggataacttacagccaatcaatgggtttctgtaagacggattaaactttttgtgtgatctagctaggcttttgccacgtactactttcccaaagtgaacgcagagaagaaggcacccaatcaattaacaggtgaaacactttgttgctttgttcgagcaatcataatcttggttttaccaacacattcaagtgataagctgtgtagtggcgtccttttttaaaactgagtttagagccgaaccatctaaaaacttggatctcgagacatccaaaggttcaacgaaagaaatcacatatataaatccagcatgctcttgtcaattggtggtcaagaacggtaaggagtttacctactaataagaagaaagggctaaactctttaatcatcttgatcgctagagaaatttagaagcacatgaacaattgtgtgtttaatggcgctaccccatgcttggtcaatgtcctccgaaccatcactaatgagggcgctctttggtacctagcaggagctgctaggctcagtgatctctttactaggactgtgctgctaatgtattaattagtttgtgttttttttttctttgggtgtgtagtattctgttgtatccttggtgggcgggtgtcggagtctttctctaacaccgtacacctattcctgcgtgttcttaaaaaaaacaacctttatatatgttaccaaatgacaaagcgtatatatgtctaaatttctagagccatggtggatttttggataaatttgattattcatagggccaaatatttaacagttaacgagttatagggacacctgctgttttttttttatatagaagagttcccttagctcatttaaaactatgtgacattacttaaagcggctttggtagcaatcaaacatgaggagagacatacagatcttgtggttcttatgacgactagctagaatgatcttgattgaggatacgcagaaaaactgcacctttctttctgactaactaaccatatataatacggaattgctaactatcgtttgtcagatttatgagccttccatcattcgtttttttagacgtcagatggtttttagatccgtgctagcatctagctgctaattaactaggtccacgttactgttcatatcaatcagggtcacaatcgtaaacatcctattgtgtttctctctctatcatggtgcagaaataatgttgagtgaaatatatggatggtggtgccacaactcgtaagatgaacgtaatttagtcacattattataaaattgaacaaaccagtcacacacaatttaactagtgggtgtaaattcactttaattgtttgaatgtcagtgttagatctgctaggtgcatatggcacgcacgcttggtgttaaagatagacctaggcctagtagcggggatacagtttactcaagcctagagccattctagcgtaatttgaaaaattttgtattgatccatcactggccactcggtggcgaaaccctacccggtgcccatccctccccccccccctcaccactggccacgatgccgctgataagccacacgatgagctaggaaggccacggtgtggggggggaaccctcgatggtggcacccgataacgcgtgcaagaaggtggcacaaggcttgtgattggcagacaaagctaccacgatgaggaagctagggtggtggggaaggcggctatgtgctagtggaggcctcgacggcgcggacctagctagtgatatgaagacggccagatccgtcgtgacgccatatggccggtgttccacgaggtggagggatggaggtggtgctaccggaagtggcgatgcgggtcagaggtgtcggatttattggcaacgaggctggcggcctaacgatggcaagcgagagttttagcggggaggtggcaatggctccgtttggttgggccttcctagcacagtgtggccatatggtgagaccggttgacaagttatcacggcacgagagccaggagatttcgtccctgacccgggaggtggatgggcagcagtggcatagggtggtgcgtggttgagcggttcaatcttctcctcaccctctccctctccttgtccttctccaacacaaagtcgtggatagagttgggtgcgtcgagcgccgtgttcctatttgtttctcagcaacatggtttctgtcatatgcgtgtggtatggttgttttttcttattcttgaccatgatctcctagggctatggtcttataatttttgttatgctatatcaatacaaaacgtcgtacgactatcaggttatagtcgtactgtcttttatatataccggttgttttaaaaaaaataaaattgtatctaacatggtaactaagctccacctccactacttccaaccaataatggagctagaggtctccatcaattccatgaatccattccataccatcctatcctacctgcccttcttctcctcctcctcctcctcgtttcttttggacccaaagtgcccattggcctctccttttctgggcctttatatacctgcccctcccccaaccccaaccagccacttcaagtccttcaacccaacccactgacacacacacacactcctctctcccatggcgctcgtcggcggcggcaaggtggtggcggcggagcctggcgtggcgcggcggctgtggcgcgtggtgcgcgccgtgctgtacatgctgcggcgcgggctgcaggcgccgtccgggcgcaagctcgccatggacctccacctcctcctccgccgcggcaagatcgccggcaaggcgctcggccacctcgtcacgttccaccaccaccaccacaaccatgggcacggcttctccgcctcggcggcggcggcggggtcgtcgtcgctgtcgtgccgcggcatcgacccggcgctcgcggtgtacgagccctcgcgcgggcgacgccgcgaggtcgagttcagctgcagcaacacgccctcctccaccaccggtggcggcggcggcggcggcctcctcggacgccgccgccgaaaccgccaccaccgccgcgacgactacgggttctccaacgacgccggcgccggcggaagcggttactacgaccacggctacgacgcggcctacgtcgccagggtgttcgagatgctcaacgacagcgagcacctcttcaacgacgacgacgccgccgtggccgtggcgccggccaccgccgagacgacgccgctgtggacgccggcccgctcccaccactcccacagccccgccccggcggcgccgagccggcatcgcggccgcaccaccgactcgccgttcgccgcgagcaacggcgacgaggccggcggcggcgcgcagcagcaggtggacaggaaggccgacgagttcatcaggcgcttctacgagcagctgcgcgcgcagcgcagcgtcgccgccacgccggactactacggcgccagcccgtacgccggccgccgcgcgccacggccggtcgccgccggcatcgcctagatcgcggtcgatcgccatagccacgcacacgatcgatcgatcgagagacaagcctttctttgtacgacgttgtacggctgtgctttgtacaccaaactccatgttgctaccattgctactactgcgtactaattacttgtcatgtcctaaaccctaaaaaccagtagcatctatcaaaagagattaatttttgctgtgtttaattgttcttattcagttattctaatgctccttacataataatcactagaaaatcagttgatttagattgttgggtggattattaatcagattatctacttgattatagagataataaataacatattttttattaaaaatatacttaacaaatagcttaacacaagtagaagaaagtaattttgagaaaacacaattttcaaagcgtgtatataagtaaatatatataatccgtttcaataatccgatgaataattcttcatcaatctatacgtgcttacgtagaactatagctagtggtattgtaaaggagagtgatgtgagagatagtagtataggggggctgaaaagagttgggatatgcatgatttggttcttgtggagatgagggtacaggagcagcctttagcatgttggttgggtgtgtcggaaggtacaacagtattggcggacttggtcatatcctcttaattttatggttgcaacctttcttgaccacaaaggacactaggacaacctgtagttgcaaccaagaatttcggtacgtttcagctttaatgttgccatgccagaagctcagttcctctaaagtgtgttaataaatatctatagctactacatgaaccttgcttataattaattgtagtttgactgatttgatcttcaattcagtttctcttttactatagtactagtggagtatagtactgtcttggatgatggtttagctcactgtttggtagtatcttgtagagctaattaaggctaaatttgaaagtaaattctggcttagatttcttagtggcatgtaaaacaaaacaagtcaataatgtagaattaattgtgtattaattattattgttcgggttatggataccacatacctaatagtaattgactaaatctcggcaggacccatcacataccatgtcttatatggaaactgacctcagatatggagggagttccggataaggaaagacaaccagagttctatatggaaacgacaaggactactcggattgtattcatattggtttccctagttctatttggacaaggggacacctatggtgtcggtgacatgggatcgggagtatcatgactagaggtttgaggcagacacaatcgcccacgtggcctggcaccctcgggggacgtcgggcccgaaggtggtgtgttcgccctcatcttagtccccccgagggggtcgggctgcacccccctcggccccgagggccgaggcgccccgacccctcgtgggttttcgctccgcgtgtatggggtaggtgagcacagtggggctcacctaaccacatttattgcggtttggctgagcgtgtcacgacgcatgtaacgtagtgcattgcactcatttatccggtctgtgaccagtcacagaccggtcagatcgcgggattaggtggcgacaggcggtctgacgcacgcctcgccccatcccgtcaggacgagggcttctaggcgctcgtccccagctggagctagcgtgttacctcccagagatggcacgttagtcctgatcagatatatgccaggcttcatcctaaccattacaggcaaaatgtagtgtgaaggagggccaacgtgcagattgttaagctgacgcgtggtggacaagaatgaccgatttgtgaccattctgacaccggtcatgtcgccagcagacagccatgattctacgtcgcgcctgctcccggcgaaagtggaggtaggtgcgggccgtcccatcagaaggtgactcgaacggcaaccatgcagatctccgtccatttatgaaaaggtagggtaagtccccataaaaaaggggggatggtgcatgtggtatccccttaagatataaaaggaggaccttgcccacggagagagggggatagattttagagagagctttttcttggactggacctttccagattaggagcccagaacaagggagaggctggctgatactttgtagctctttgatacacagatctcccaaaaacacaggagtagggtattacgcttctcagcggcccgaacctgtatacatcgccggtgtcttctgtgcttcctgtctcgcgaaccttccacatacagatcgggagtttagagtttcacccagggtctccggccgaaccggcaaaggggggccagcgcggtctcccggtgaggagccccacgctccgtcatatgggtataaatacaaggccccctaggaggagaggggagacagaacaatagatcaagacacaagatcaacgtacaagccaacatacgccaagacaagacaccggatatcgacatcagagatatgcctggaccgaccctatccggtatctacggaggccggctgtagggatctagcgctgtctctgatctcgtcgggcacgaactcgaggatgaagactaccctattgtcgactacgggatggtttcatggccgtcatgtcgacaacagatagataggctaccccaaatattgtactagtgtgattatggtgaataagagcaacgaccggcttcggccaacaggatgtagggctattacctgtcagataaggggtccgaacttgtataaaaatcctcgcctccgtcttttttacctcaatctcgcatatatcttagtaccaacgatccccatactatacaaataccggaatcgcgacattaaacgtcgacaattacaaagttaaggaatagatttatttgatttatatactccattaaaaagtagtaatggtgatgagtggtgaatctgccactattcaccactggagtaactccataccttttagaatggagaaatgattatgtgaggcctgagaaccagacaatcaccaactcttttttctgaaagagaaaaatggtagagtggagccaaaaggcccacacgtcaataacaaatttatcaaattaagatatgatgtatatgaaaaataacggtaataacgggttagtaataattttcactgatcaagatcctgttgcaacacgggagcaatatgctagtttctaaaggaatttctacataaaaaaatatttgtaaagcacatactctctccatccataaaagttacacctatttcacatttgagtttttctaaataagctgttcctatttatagtctttatgcattcaagacttaaatgaagagataaattaaatgttttattagaacccaagaagtcatctaaacacttattggttgcatgtttgcattcactccttgattttgtaacatctaagataatttaatttctccttggttttggtgtcaaaagtaatatgtgtaacttttgtgtatggagggagtattatttagctgtctcagaaacgtgctcaaggtgaatgaatgagtagcaatatccaaactcactttaagctcagtctaagtattgagctggagtgaaggagtgactattatccaatccaagataagtagttgaggagcagtcgtatgtggagcaattaattagttagcagatgaagcagtcccttattatttaaggaccaggcatggaacaaacgatcgaagaatcttcttgttcctaatcttaattaagctgaatttcgcatgccttgtgtgctgatttcttgtgctgctgaagcaatccccagttgtcctgcagggagataaggatccacagttaatattaatcccccataaatggttgatggcaatgtagaactgatctttttgttccaacatctagccaaaatttatgcgatatagctgacctgatcctgatctaattaatgattttgttccaagaaaccatcagtttaacttctggtcttcttcattctcgcagagcacttgcctgcctttttcttctttttctgccatgatatcagtcatcagtttgaccttgcaaattttatcaagaacagtagccacagtactacagcctaaaagattcggagaaagtttgctgcctgctgccgtttgttgcccgtttttctctgacacgcagccgtagcagaacgggtgttcatggacttgactttggactccccggctaactagggctcacattgtctgactgactcgtactaccaccatatgctgggcacaccttactaactcctctcagtcatgtgtactggcaaattaaactgcacattaattagttaaagcactgagtaatatctggttaatttccatgttgtagtattactggttaatttttatgctatagtttatttttatcatgttcttttgtgcttaacagatgaatagatgaacgcgtacgcttttcgaacttctaaactaaacgatatgatttttcataaaagaaaaactttctatataagaacttcgtataaagctatgttaagtagtatgtttttaactctttaatagttaatccatccatttgtcccctcccctccaataattaccacaattcattgggtcattcaacacaaatgcatcactgctttcactttcaaaattcatgccttgtattgatgtgcataccgatataccatcattaaaatctatatacttcattctccttcttgcttctggccagctgctactactggctgctatagcttcaccttgcacagttctcatgagacagacctgcatgtcttgctgcatgcttagagagatggatcgatatatatataattatgccctaaagatatattgagaaaccttttcaccactctatatatgtgcagctaattaagcttcatggaacaggggggcgatggaaaattagcagtcaatgaatcgatggggaaactagtttttttttttaataggggacatttcatgaagcaatgaaatacatccggcctctgcattgattagggatataagaacactaaaaaaaggggtaaaaacacctatgacactgtgaacatatcatgacaattatgacaacttgccctcttaaagctggacaaaataaaagaccaagaactactccaaatcatagctgaatttccatccaagtttgaaacgacacctccattaatgaagagtcgacaaacaaattaacgtcaaacaaaccattaggattttcacccctcagaatcaaacgcactgagagctgtttttgtgcccggcgaaacgagcttggggcggtgcgcaccgtccgatcttttttatgcggctcagcatcgaggctccgtgtcgcagagaccggtgggcctcacatgatggacggcccatagtctgaaagcgactcacgcttgctgcataagcaggccggcccgaattatacagtcccggcccaactattatgggcctcatgtttcgccacaaagtccagttcagttctaacgttatgggccgacacagcatcccgtttcggcccaaacttccgtatccttagggagtgtttgaggagaaggggattgaggagattgggaagatacgcaaaacgaggtgagccattagctcatgattaattgagtattaaatattttaaattctaaaaatggattaatatgattttttaaagcaactttcctattgaatttttttgcaaaaaacgcaccgtttagtagtttgaaaagcgtgcgcgcggaaaacgagacacaatctctcctatctccacctaacgaacagagccttagtcttcctcaaccgatgcgccgacggctccctgtgtgtgcgctccccttccttcttccatgattcccccaaatatgggggcttcgctgttttgacactccgagtgatgataactgggcccatctatgtgtgtgtatgaaatatgggtccagtgtcattatagcaaaggttaatatttatagtgtcataattgcaaatcccccttccacatctggcctgcaaggatgccggaagattcagagaatgcaaccatgatatcgatttctcgagtatattggtctatttgtcagcttcttttgcgtcagtttttgtggttcagtgatgtacagtatgaaatttgcgaggaatgaggtatcccccctgttctgtaggtaggtacagatgaacactgttctcaagacaacggtacaggtccccatctattggtggttagggctgattataaaccataatgttttattagcgaattaaaagtcttcctgaaaaagaaactatattaaaacacatctaaatcaacttcaaaattgagcttcaaaattcaaattttggtattgacttataagccgtagggcgaatgatgagacccacacccatagtatgaacacaaagtcatcacttatcaaggctccgatgaatctatctcagctctgcagaggtcacacctcggtcgacagccattctcatcaagctattgattactccaccggtaataacggtttggataagatttggtccaatccttaaaattccgaccatctcaaaaacttagttaatttaaaaacaaaagaaaatgtataagtagatttttcttgaaaattactatatcaaaacttcagattttgcaaacttattttaatataaaattgatggtcggagtttcagaagtttaaccaagttctaagcatcaaattatttataattagaggatttgtttttcgaattgttaattaaggttacatttaccaagctgataaggccaacgtacatcctcataaacaaggctaataagctgataattaagatcaagcattggcatgacaagttcagatgatcacttatcactgcttttagttacctctccttttccaaactcgtgttgatttgcctgcatgcttgccagtatcagcttccaaagcttaacatctgttcttcttttccttgcacaaacactggttaattggcatgaaatcgttggtcgtccgtgaccatgaaaatgacattgatgcagtcgtcgtcgtcataatagtacgctaatgatgaagatcacatcatcgatcacctggtctgaataacttccacgtgattatacaatcctaatcaccaatatcaccattaactctgtcgcttcagggtttatttgacgcttcaacttttttttgtagttagtcaatagtaatcagcgatggttattaatcaccacacacaaaaagttgtgataagtcatgagaaaaaatatcaagggagatcaaggggctagctaggtagctatagctgatgataaggtcatggctaacgtaactgtgatcacctaacgctcttatacgaattagtacatatcttctcacctcagtatgagtataattatactcatactgaatttcatactcaaacagtggtggtcgatgagatcgatggttctagtcctttagacgactgaattctcgattttagttatacgtatatcaccacgtacacgtgatatactgatatatctgcaaaagtgtcccttaattaacatatataaccaattttcgtctatttgtggacttagtaaagatttaaaagagccttaataatttgcataccaagtagtattaaaattactcgacagtattaaacacgagaatacagcgtctgtaggtaccaatgaaccactagatagcaacttgggagtttattttttttttctatgcaaagccttcttcagttaatccctttcacaatagaattgaaagaagagatttaatttgttccacatctattgatacgaaaaattaatcccctctaacacatttattaacataacacattcagtcttttcttcttttgcgtgctccatctctttgtagcgaccggtggcggctgcgcccggaggtggcagcggtagcagcggctacgcccagagccggcggtggctgcacccggaggaggcggcgacggcggcaggcgcagcacccggaggcggtggcgacggcggcggtggctgcaccaatccctccctccctccccattcttctttgttcttcgtttcatctccgagcggtgactacatccagagatccaatcttctcttccaagtgtgttcagtacacttatcatgtgagacaatatttattttgttctagtgatgtactatttatctgtgattcatgtcattttttttaaaaccgctaaatagcttagctgcagctatagctggctatagttgatgaaaaccatagccgctaaagggtttagccggagatttaaatcattgacacacctattaagatgcaatatcaatcccctctaacccttttattaactgaacaatccctaacgaaatttaattcaacctctacatttttagataaatgaaatacatttcggcctttttttttctaagaagctagattcaaaccagcctcatactgtcatccatataactgggtttgcaacaagctactcgaaccttatctaaaatacttagatacacctacaactatgattagtacgtcatcacatacgtgagacactaaaataaactcatgcaagcatgctactcgtgtcaccaatcatgagaccacaccacacaatagtgcacacaaagctttaatttgatgataagtacggcgtaataattagttaagctgataagcacgcagcgagcaccttgtccacaaactttaatctctgctcgtatcaaacaatcaaatcctgcgtgctgctgctgcttacccggcgaatctgctcctcaattttgatcacaagatctgatctgattcatgtcactgtccatgctccctttgattcttcttcttcttcttcttgcctacacacaaaagctctataaattagctcccatggcgtagtagctagtagggtgtatagctactaagctagtaattaagctaagcaacacacacagaaatcagcagcaagctaagctgtccatggctcccaatggagaagcttcgtcggcggtggtggccgccgtggcgccgttcttggcgacgttcatcggcaaccaccacctcgggcacggcggcgacggccatggccacaaggagatggagctgctggcgacgacgaccggcggcggcggcggcggcggcggcgagagcatcccggcggaggagcagcagcaggtggtggaggaggcggagtgcgagtgctgcggcatgtcggaggagtgcacggcggcgtacgccggggcggtgcggcggcggttctcggggcggtgggtgtgcgggctgtgcgcggaggcggtggcggaggaggccaggaagaagaagggcggcgagcgggaggcggcgctggcggcgcacatgggcgtgtgcaggcgcttcaacggcttcgggaggacgcacccggcgctcttccaggccgacgccatgagacacatcctcaggaagctctccgccgccgccgcccctggatcgcccaagccgaccaacactagccgcagacacttgacgacggcagagggggccatcaaatccaccggcggcatgctcatcagctagcttaattaatgtatgacgccgttgacttttcaaccaacgtttgaccattcgttttatttcaattttgtgtacaaatataaaaatatttatgtcatgcttaaagaacatttgatgacgaatcaagttataataaaataaatgataattacataaattttttgaataagacgaatggtcaaacgttggacaaaaaatcaacggcgtcatatattaaaatatggaggtagtatatagctacttcctccatttcacaaacgtaactaattctagcatttccaacattcatattgatgttaatgaatttagacatgtatatctatcaagattcattaatatcaatatgaatgtgggaaatgctagaatgacttacatttgtgaaacgtagaaagtagttcaagttgcataatttccaaaaaaaaaaaaagaaactgaagttgcatggacaagtgtacaacaagctatagctgatgcttttgtggtggctaattaagcttgtatgttagctttgaccaatgaagagtgcttataagttaaaagacattatataggcagctcatattgtttaactatataggcaatgttgcattgcatgtatatatgtttatacctttgacttttattatgggcttttgttgctcttttagcttgagcttaatgagtgtaacaggctccacatcgtccaactacatgctgcgcatcttcatgtaaatatacagctaataataatctatctaattgtacttgtccaccaagaattcgataaataaagtaaacgggtgattctaatacacttggtaatctgcaattcctgtgaattactaaactccatatggtgtctcatgtagccgcggcaattgaagttttcagagaggtatatcaaacatatatttgtatgccaaagtacgacagaaactacaatgtatgaacacagactaatataaagtttagctctgatatggatgaaacaggcagcagttgacccaattcaaccagattctttacaaaagaaaaccatgttgagtggacgctttaactcaaacgaaatgcaaaaaataccaattgcttccaggtaagatgtggtcataggcacatattatcatatttgtggatgtccctgaatacagcagtccacactaattaaaccgattattgaaggaaaacaaaaggcttagaaagtctgccgcgcgcggcagcaccggagtgtcgtctttcgttatcgaggcacgctgagacccgtctctgcaagacatccaggagatcatcagtttcaggttgtcctgcagcaaaaacatctacatacatctgcaccaaagatggggtattacaggtatggagaagttgcttatgtgttggcgcaaaaaaacagaaaaaaaaattcagcactgatgaacttcgtaatataaaatcattgaagggggtgtttgctttgctttggtattgtaaaacaaaccaaatattgataacaccaatacttggtggttgctttgtttggcaccaacatttggtacagtgtaataacacccttgaaatttggtggtgccaaaatgaatgcactccaagggcaaggaaattgctagaatattagctatagttcgaaacaggctttctaagttttagcaataccaaattctggcttggcttgctggaggcatgaactaaacaagcatcacggattcatggtaaaattggagacatgaaccaaaactctagaatgccttgcaggaggcaaggacacgacaaacagtgtcgaaaaagacacgtctgtattgaaattattataggcagtatgaaaccaatttcatgaaatccaaaaaaaaaaagtgaatgctacaattaatgacaatatggatccaaactgtccaacagaccaaaataaattccattcccagattgaataatgcattgtaaacttcagttgagcagaaaaagttcactaaatgactttggcacctctaatggacggtatatgttttggagcaggatttcattgcaatgctattgattattccttttctggtggggaatgttattgatcattctttttctgaagagtaatgctattgattattctactggatcttgcctttagcttggcacaatgttcattaagccctctgtgtgtaatccccccccccccacccaaccaaaaaaaaaaaggggaaacagaaggccgcaaattttgcatttgataacctgaaaagtttgagcattaatattttattaaactattcagttatggtaaatgaaaagattttacgttacatttttcatgaaacttaatttgaaattagtttacaacttgttttttcaataaatatcttgataaaaataatgttgaaaaattgaatagtagcagccaacaatgtgaagcattttgaaagagatagtaagaagtagaactgctttagatctcatagtgtagcagtagcagtagactagcactacagtacaagtacaaaacattttccccaaagttatggatacggtggaatattgtgcatgtggtatttcctgttcaacaacagaaaatatatatatatattaactggatgttaggcaccctattaagaagcaaaactgactatcaaataacatgcttatgtatcctaacaatttgctctcttgtttgatgtttcccatatggaaaatagagaacactgagtaccttaactaaccaaatgagagtattcagaacaagttgccatttctgggaaaaaaagtggcatttcaatgtaatattcttatattcatgggatgttaatgtatttatttccaatatgccttaaggatggatacactgcactgtccaacaaagtgttggtacaatcgatctagtggtggccttaatggtctttcaaacagaaaaccaattatgtcctgcagacacagaatgacagcataaagagcatgaacaatactcctacaagttcttatcatcccagcatttcttatctagtgtgaccctgtcagtttccaccatatttcatagtaattccgttgccaatttacaatgtcgtttggtttgcagaagcagtggagcactgagagaactttgctttcaacaaaccagacccagggatagacatttaatcccatatccaacagttactcgggatcaacgaatttgattttattgatgactaaaactaagcatattccgacaacaattacatcagcccagccgaatctaggcacaagatgaactagaacaaacaaggcaaatcaaagcaaagcaaccgggtgcggtcacaactcacatgcaggatgcaaagattagatttgatatcagactcagactcccgggaaggagctgcagagcgtaccctgcgacacggcccgcgccacctccgccccgagccgcgacgtcagccgcgcctccgccaccgcgctgtgcagcggctgcagcgacctcgcgagccccaccagccgccccacggacgccgccctgcaccacacacaagatttcaatctccgcgaaggggaaagaaaaaaatgagcgaggggttcagccctgcccgctttacctggtgacgggagcgacggctcggggcagcgaggccgccgggctccgtcccgcggcggagcggaggaacgcggcggcggggcgggagaaggagcggaggcgcgacgccatggccggagaggggagagaagagagagacgagggttttagggttctcgtggactctccaatttgaggagagcccagtttattattgggcctcactctattagattcgaataagtctgctttgcttccctcaactcatactggttgaatcgcatccctcaactgcataaccggatataactcatccctaactttcaaaaccatagcaaatcgactcttcgggtgttccggaggcggtttcatcctacgtaacacttatatggtgggttgacttgatctttggcgcttacatgacactaaaattaaaataaacataaatgggaccacatgtcagtgagtaaacacaataaaaacaaattccgggcccacgtgtcagctaccttttctctctctcaggtggatggcagcgactggcactccggcagacggcagtggatggcgtcggcaacggcgagacagagcacggcagagttcgacggctaggccagcagggccggcggatgagctctccgcagcagacggcgcgcaagcgctgctacgtcaatctcggcaaaggggacgactccgcacgccggcttagttccctcccgtccttgctggctccccacaccgccgcctcctttcctttgttctccttcccaacactgacctcgtcctccgcctccaccttgaccccttgccccgattacaatgtggatttcgacaccagcgaggatcaccgcccctccatcaacctccacgtctcctccacctccctgcttcgctcccgccacttcgctactctcctctccgaccgctgaagcccgacgcagccacctctccctcgccgtgtctactccgtactccgtggggagggatgagaggaggaggtgaggacagggatgaggcagcggaggagggcacgcgggagggaaggcggcggtgggaagggagaagagggtgaagggaaagacggggatgaggcaccggcggaggggcgcgggaggggaggcggcggcgaggcttcctcacctctactctctctctctctactcccactgtcttgctgctcccgccggtccaccgcttcgccgagctcctggctgccgacaccaacaccgtcgacgctgccatcaacctggacgtcgccatcaacgcggcggggagggagaggagaggaggcggcggtgagggcgcggatgtggaggtggcgacgaggagaggaggtgtcgccgttcccgttgttctgctgcctcgagccccgccccgccatcctactgctcctactgctctatcgagttcccgcccccccttccgcgctcctgtcgtcatactgctcccgtcgagctctcaccgccccgatgctcactccatcttgatcaacgccgagtataaagagggaagagggaggagttgagtaactgacacgtggcctaaattttatttttatttaggtttgtttttattttagtgccacgtaagcgacacgtcgatgccacatgggatgtaaaccaagttaaccccccacgtaagtgccacataggatgaaatcacctccaaaactgctgggggagtcaatttgcaacggttttgtgagttagaggataggttatacccggttttgcggttgagggtgcatttcaactggcgcatgagttgagggaagccatgtagacttattcttattagattccgatatgggccactgggcctagcctttcgatttcgagcccaaactaggcccatccacttgcaatatctctctttctcgctcgctctcgcgtcgcgtgtgcttctttctcgccttcttcagtccgcggcgttgttccagaagcttctggaaagtcggggaaacccccatggcgtccggcgatccggtggacgcgccggcggcggcggcggagtcgatggaggtggaggcggaccagtgcctcgacctgacgagctgccagctgcacgatctgagcgaggtggagatcccgcccaccctggaggagctcgaactcacggcgaaccgcctcgccgccgtcgacccccgcatcggccgcctcccgggcctccgcaagctctccttccgccagaacctcctcgacgacgccgccgtcgcgcccctctccacctgggccgacatcgctgggctgcaggtggttgtgatttccgtctctctatttgggaatctagggatttaggaatgtgtggttgcgccagtccttttggggctcgtgcgatcgtaataatgctcttgtttacccaattataagcttgtgtaaaccatttctgctatttcttttattaaagcaacaacctttttttgttgcagttacatcatgacacagaggatttctgtaagaaaagaactctataaattgtgcctttagatatacttggttaggtaaatatgtataccgtatacatattgaggtgatcaattcggccatgtttccttgtttcaaccagtaacaagtacaggtagctagagtaaactacatctatatgaaaaaaaattatatgatttagaaatggtgtatgacttgtccacattacatctatcctgaaaatacaaacagacctaacatgttatactaaatacatttatcgtggtttcaaagtgattaatcgcataaagttttttcttcaacttggtattacttctccaatgtcacagtgcggaattcatgtgttgtcaaaataatttgataataatatctgaaaaacatcccctgtttcaggagttggtctttagagataacaaacttacaacgattcctgatgccagcatcttcaaaggccttctggtctttgatgtatctttcaatgagatatcttccttaaaggggctgtccaaggtttccagcacactgaaggaactctatgtttcaaagaatgaagttgcaaagatggaggaactcgaacactttcatgcattacaaattcttgaacttggtagcaacagattgagggtaagcagtttgcagtgcattttaagttccaccagccagtcaagttagtcagatttgatgtataatgatgcattgtgtacatgcattcttacttatctactgaatttcaggtgatggaaaatctagaaaccttggcaaatctgcaggagctatggctgggaagaaatcgaataaagacaatcaacctatgtagtttgaaagcaataaaaaaattaagcttgcaaagcaacagactgacttcaatgaatgggttacaagtactgtgacattactttctctcatcccctgattttcttgtgaagcgctacttgataaccagtccattgttctcttattcaggaatgtattgcactagaggaactatacctcagtcataatggaatacaaaagatggagggtctctctaccttgcagaaccttcgtgttttagatgtttcatccaacaagctaactgctatcgaagatgttgaaaccttaagcaggtaacactgtttacacttagcagattgcttctcaccctcggagacaaaaaaaaaaaaagtaaacagcataaccaaaaaattggttctgactcctttcggtaccatcctcactggccatgcaggttggaggacttgtggttgaatgacaaccaaataccatcactagatgggatagaatctgctttggctagttcacgggagaagctgactaccatatatcttgagcggaatccttgcgtaagtactgcaattcttatgtagttagtcatcaactgttcttgtaaattgaaatttggtaataatctgaaagatgaacagaactgggaataagcaaggagccttctccacgcagggccaagataacacaatcgtattactatatttgctccccagcttctgatgaatttaaccacatatgattcatcaactgtgaaagcctttcatcatttagtggcttccaaacaactccatttattttattttgaatggaaagttacatcagagtgtcgtcattgcttgaatttgcattcatccttgatttcccacgaatctttgtaatcgtgctacagttgaaatttaactaccaacaatttgtttatcgaagtacaaacataatagctaggatgttattgagcttgaatagtctgtactataaactctgttatgctagtcagattagacaaaataatttctgttggtttttaagaaatgcatgtacattccatgtatatttactattgtccagtgctatgttgagattgaattgtcattgcctatgtcttttcatttttgcaggcaaaagctccaaactattcatccacgttgaagacaatatttccaaatcttgagcaactcgattcagatatgctagcatgaaactgatgtccttctgtgaagatagggaagacactcctggagtagctctactagcgttgttttttctaacaatcaaagcgtgagaagccttccagttcaagaacaagtaataataaaccatggatgaagcaatgcaacattattgtgctcaatatctaaattgcttcacctttttttcctgctccatgttctgatgctgttactggatggatcatcgtgggcttgtctttgtcaaactatactcccatatacagagatcaaggaaggtgagttagagaggtagagcgtgtgggactgaatgataaaccaataaaacctagcgaactgatgtttttgacagatgatgttgcatttgactattctgtcacaggatgttgcatttgatattacctgtactatgttgacatgtatgctattgcatttgctgtagatgtctgagattgattcaagtttatgaaagcagcacacatttgaatgtttatggcttaacttataagcatgtgcaaccgttccggttattctggttgctgtcatatgcagtaaagttttattcatgatgaatctatcaacctatttgttcctccctctctaccaggagattatcgtccactccgtgttcttgttcgttccatcttgtgagaaacaatgaccattaagaattctcttcggggctaagtaaacttgattttcttttaaatttgggttgtgtttagttcacaccaaaattggaagtttggttgaaattgaaatgatgtgacgaaaaagttggaagtttatgtgtgtaagaaagttttgatgtgatgaaaaagttggaagtttgaagaattattttagaactaaacttggccttggtgacagaaggcgccgctgcgaccgccaacggcaggatggggttgtcggcatcgagagaaaccatcacggcgtcacctcctcgtcctagtcaagcgccaggatgaaccgaactgctaaaagataaaagaaaatttagaagccttgatcagacactagataaattttctaaagataaaagaaaagctactaaatcttatctaatcaatagatataactaaactactatgctgtgatgttgataatttctctttgtacttagtctcttctagataaacttttattggttatttgatctctttttttttttttaccgaattcactaaagaaccttaccaaaatttgacattaacagacgtttgcgatggaggagggatggggattggacgatggctccagtggcccaaccaaccgctttctccgttattctctccgagctatagcagtggcctcgtgtctccaccatcgatcgaggtgggggatgtagccgaggttggatgcgtcagcggcactgcggagcttgagaggataggtggtgtcatcgttggagttcgtcgctgacgctgagttgcttcccaatcccacgcgacgccaacgacaagggaacaataggtgaagaggcgcggggtgctgtcgcgaggtagtacaaggcctcacgcagcagattggagggagggagggaggagagtgcctcggtagcgagttagggagaggatgggggtggaggaaaggccgctgccatcaagatagttcctccacggcgatctcgttctttcgtgttgtacctgctctgccttgcggtggacgcgatgcaacaaacccgggtccatatcccctagagttggcttcaactccacctggtagatttaggctaatctcagccattatttgtcacctaccggtgagattaaatcagtacacctcaacatatccttaatttgtttctccattctctgatcttatcttttttagtataaacaagtcctctaccatcggctctatctactagctgtacagcagcatcaaggagcttggtgtaatgtataaggctttgcttatagtgagctcgcccagtttccaccatcgcaagatcctgtccatgttcatcatctacatgactacaataccactcttctaaaaaagttcatgttggtcaattaattgggggaggaagaagaatacatttattttattttctgttttttgagagctttattttattttcctgattatgttggaaattgattagttgaaaagaaacatccaaatctacatcaatgaagagagtcaattaggatctcaaccataggaataaaatgatggccgagatttactaaaatccaggtggagttgatgccaactctaggggatctgaacccaacaaactctatgccagcagctgcaccttgtaccgctcctagagcccgaggcggcactgtcctcccccggcttgggagttgggacttgggagtaggtctcatgaatcatcccttgcgcgtcactagttaagtgagtaaaagtgaacttattccatagtcgtgtacgggccataactattatgggccgcccaagcaggcgtagaggagatgacggcccatttgagttcgttcgttcttcctcctcctgatgaagtcaacaggtggagaaaagtcaacttttaatctcgggctctaatccatccgagcttaagatctctctctccattagcgccgccgccgccgccgccgccaaaaatcgccggcgaaatggacgccttcctcgccggaatcccgcagctccgcaggccggcggcgctgatcgcgtcgtgctgcgcgctggtcctcctcgccaccgtcctcctcctcccgcgcgctcctcccgccgccccggagcagcttgcctccgccgccgccgccgccgccgtccgcctcgacgcgagggtcgagcggaggagcggcaacgaggtgctgtggcagctgccgccgccgacgacgcctccccgcgccgcggtgttcgtggccccggggtgcaccatccgcgccaccgacttcttcgacgcctcgccggggtgcccgcgctgcgcggggctccccgaggagcgccgcttcacgcgcgaggcgctccgccgcgggtacgccgtgctcgcggtgtccagccgcgcggagtgctggtccctcgacaccggggacgggggcgagctcgccgccgtggagtccatcatcgagtggtgggtcaaggagaggcaccccaaccagctcgccggcctcccgctcgtcgggatcggcgcctcttcaggcgggtacttcctctccgcgctggcggcgagggtcaggttcagcagcgtcgcaatcatgatcgccgagggcgtgttcgccacgatggaggagatcccggcgaggtacccgccggcgctgttcgtgcaaatgcccaaggacggcgagagggcgcgggaggtggcggcgagcatgggcaagctcagagggagccgcgtcagcgtgcgggagatccaatgcggcgagttcgccgtgagcgcccagttcttggcggcgaggatacccgggttgaccctcgccgtcgccgatgggctggtcgatgtgcttcgccggaaggggttcgtggatgagaaggggtttctgaagaatgacgggaggagcacgccgtggaagaaggcggcggaggaggcgaagatcttgccggaggaattccggctggagaggcatgtcacggaggagctgaatcttgcatatgcgtaccatgagtttaccagcctcaagaatggggaaatcttcgactggtttgagtcgcatatggatcataagagctgaaagtgttctagtggcaatgctactgaaactgatttgaagcgagcaattcgatggtggatccagctgatgcttctgattttgaggaatggaatgcacaatcattgattcaagagagatgggaagatggaggaaaacctcgtaaggcttcttctcgcagtttaccgttcacaatgcccacttgtagtttctaatacaattacgttccattcttccattgttgttgttgatgtaacaggcgttttattaccattgtatcttgtaacagaggaattacttcaatccacagaaaaatgataaagatgccgaacaattggtccatgcagagcaaatgttttcatacccagtcacaaagcaaagacatgcaaagcatttttgtgttctctaacaaaatattctagtgcaatagtgtctatactgaaaatataggattttgcagttatcttgttaaggaagtatctcacgttcctgttgaatataactccattgggtaccatgttcagttaatcatcacaaagatattgatgggcactttgtctcttccaagtaaatcgtaacattgtcttgcaaatacaatccttggctccttgcaggttcttgtttactctgttacttgaagcactattttacacagaagtgcacatttcaatttcatcaataaattaacaattagctgagcaatctgcaaagtttgcttaaattatttatcaatgccaatatgcttgtattttattgttttattgtattgcctccatggatatactggatgtgtttgttttgcttccattctctagtgctctaccaaaattttggcaataaaccaaacaccctaactttaccaaaattttggtagcacctatgttttggcttgccaatatttttgttggtttacattggctataaaccaagcagatccatccatcttgatgctaaagcatcaccaattcaccagtaacttttccttcaataagtgacccttctttttgtcataaattttctatatcattctccattcaattttagccatcttatttcgtttttggttttgttaatgtaatttatctttgccgaattattgttgggtatattaggaaagatcagaatattggaattttctgatagaggtttcactcttcaagatcaatgaaccagactaccagaggtactcctcagccatgtacttttaggcccagctattgttacacttctttgtcagtgtaaaaccaagaaacagacagcgctacagcagtcacaaatatctcatagttatggtgtgatcttgtgactacgctatagcttgcttttataggtcaccaaagcaaaatcttgcagtgccatctgtgatggatttataaaaatcaaatatcttagatggtggtattacattgcaaaccaaaagaatacaatggatttatcaaacagcaagattacatcaatgaagaaacacataggagcaaataatttagccaggaaacacctcttgaactagtagtgataatcatttgccttcttgaagatctcagcctgggaagaagcagcgccatcagaggtcatggccacgacgatgcaatccttaacctgttgggtggtaaaagggaatttcttgttcacaatggagttgaggtatgcagctgctccctcgcggagcagagcaccagtaccatcagttccagtgtttgaaagtgcatcatgaagattttctagcttcttgccagtgatcaaactgcaagcagtaccgagtgtcttgccaatgtcgccaagggacccaatagctgagatgataacatctggatggttcttccagtaactgtaattttaggaaaaaagtaaaaccattttagactttgttctttgtgatatttgataatgtgaactcatatactggctcttactcgcaggatccacagaaatcatgctttgtcggaacttcagggacatcaggtgtgctgggggtgcttggtgtcgtgccgtaagatggtgttggtgtagtgccgtaagatggtgttggtgtagtgccataagatggtgttggtgtagagccgtaagctggtgttggggttggtgttggtttgtaaccaccatctgatccatatgatggagttggggagccaccatctggtaacatatacaatatcacatctgttataactgttaattctgaaagacataaaaaacagtatggcatatccttgctgtcctgtaatatggtcaaacaaatgtgatataccgtaccttatagtacatccgagttaacagtgagttagcactacattcttagttgctctgcataatttagttattttgtatttgcatttactaactagatgctatatgcagtgttctttaacatcgccacatcaaccacgttagatacaatataataatggcatattgcacagaaggtatgggggatagaaaaatacactgagtagtagaagagtaggtcttctgttcagacaactctcccaggctcctgcatgagctcagagaaaggagccccaccaggacaccactgatcagaagaaccttgctactcatcttggctctcagtatctgcagagaagacagaatggatgactgaactggttgaggtgcttgagctgatgaactgaattgcctttgtgcgcctatatatacatgcgaaagatgctctacagttccattgacactgttagtagttgtctatcatttaatggtttgattcgtccagctagttcagcatgacggtgatctgctcgctttcaattcacatgatgaagcttccattgtgagttctttaactcaaatctgtgtccaaatttgtaggttagagcgaggccatggcacttttagcttccatggatattggcagtcttctttccatgcagaatggatttcctccccgaaagtctgctgatttaatggggatcggtgcttgccacctactcagtacacttaaccatgcctcgagctggatttcatgctgtggtggcaaaattgaatttctcaatttaatggaagcacagtatggtaagattccctggcccagttgttatgtggaagcaccaaatttgattttacaattgtttttgtgtaaaaagcgatgctttggtctaattccgcttgttaattcttgtaagtttcttggaactgatttgtgccgcagtctttcatgctatacattatcagcacattacattacagaattgtgctgcaaagttttcgagtttttctgatctatctggctgcttctagctagcgttagtttacttggtatgctgtagaccttgtgctgttagttttttttaattgaaaacatttctgttttagttacaaacagaccttgctgctcttaaataaaaaatatatatagcaattagtgtaatgctgctgcagtcattcatcaatatcgcacctgcgatttcatcatgctatccatcactcacattttcgtccctcctataaacaaaactcctactccttaatcttgacagcgtctgacattgcagatgaaatggagctatgcatgtgtgatctcctgtcaagaattacttacaatgaccacaaaaaaaggcagaaaattaccaggtaatgactagtagcctgcatccaactgtctattgcccttaacttctggaacagtcgaactctctgaaaccatacgtacatactccctccatttcacaatataagtcattctaacatttcctacatttatattgatgttaatgaatctagacaaatatatatatctagattcattaatatcaatataaatgtgaaaaatggtagaatgacttgcattgtgaaacggaagaagtatgggactgaactaaccgttacagttgcagctgagcaggaccaggccaggagataatagaggaatggttgaagataccagcaacggctgtacttgcgcaagatgtgattggccctggggctgaaactccatgtgatccgtcgtgcatttgctggatatcactgtgtgtctgagtggctgcctttaattttccgaagggcagagttactttggtgattgttgggcccctgaaagctgggctagcacatagtatttctgttggcacagtcctaatactcgacctaagatgttttacataggattaaatgagctagccgccacataagattttttatgatttggtgaaagatttaatggtgaaaaaaaaagaaaatagattttgcattgacttggtattctacatgacatccaagatatgatgagatataagtgatattaaatcactgtactgaattagtagtgtgtgcatattatcacatctctctcatgggttatggaataaataaatccacagtgttggctactgtctgtaaaatttactagtaacaatatcattgggcagaattgcataaactaattgatgaaaaaagaaataaagttgaaccttaatatccgggccgactgtcttcaacgcaactttcaaagtatttaaatattatttctgaaagaaccagcatgggtaaataaattagagatgtgatttatttacctattgttatagatcagatggatttttgcattttatactaagcataactaattatctgcaatcaaactcttcactagcgatgatggtatgggttcaacttatttcagcttatattcaagctgtttctcccctactgtaaattcaggtcgttgttgatgatacagtagtaactagtgttttgtcggtgaagggactacttaatttcaggctattatgagcccattttggtagctccggcatttaaaggaggcatattttgtgtaactatgcaagctacatatgcgcgtgtgattcacaggatactttagaaaaactactccctccgtattttaatataggacgccattgattttttttactaatgtttgactatttgttttattcaaattttttgtgaaaatatgaaaatatttatgtcatgcttaaagaacatttgatggtgaatcaagtcacaataaaataaatgataattaagtaaattttttgaataagacgaatggtcaaatagtggacgaaaagtcaacggcgtcatacattaaaatatagaggtagtataatatattagaaagggaaaaagatgatggtcttatgctaccttctacttctatctgatgttacccacagatgttacccattaacatgtgattaattaagtattagcttaaaaaattaaaaaaataattaatatgatgttttaaaataacttatatatatatattttaaaaagcataccgtttagcagtttaaaaaacgtgtgagcgaaaagtaggagatgagttgggaaagaaaggagaaaaaacacaaccttatatggctagcatcactagcatatactttctccttccttctgttatatgatactccctcaatcccagaatataagaagttttatggttggacacggttattaagaaagtatgtataagtgagtggtggagggttatgattggatgagtagtggaagtaggtgagaaaagtgaatggtggagagttgtgattggttaggaagagaatgttggtggagaagttgttatatttcaggacaagtcctgaacaaatcccgaggactaaaggttgttatattttgggaaagagggagtattggttaagcctcaaataaataaaatcaaagggagtacataacatgcacatcggtagcaagattaatgcccctaattataatggtataaccataataggcctagtgtttatgtttctagagtataagagggaattaatatactctctccatcttcaaatatttgtcacgagatactattcatcttcaaattttaatagttgatctttttagaaaaaagaaatacttaaaggaatttcatttaatgaagtactatacatgttacatccttgcgaaactttcgtatatatcatggtttaaccatttaaatctattggtggttaaagttagaatttcactggtcaatagtaacagttttttcatatatagtaacagttaaaattccatattaacaaccagcgtatacagttaaaaaaaagactatatatatatatatatatatatatatatatatatatatatatatatatatatatatatatatatatatatatatatatatatatatatatatagagacacacacacacgcatgcgttcgtttaagtacaagccggcaaaaacatgcatgtaaaccgacaggggtacattatattaagctttcttcagacttactacatgcatacaatcaattttggatgcagaatattctagctgggaatttggtagaaactgtttcgattcatgctcgtgcagacttttttaagtaaaagcaaagggagtggctcctagtattatttaaaacagcgggaataaatatgaatacaaaagtagtagtagttaagaaaacaaaaatcaatgaggaaattaaagaaaaggcgaaaccatgcatgcatacttcatccatactcataaaggaagtcgtttgttttaagtcaaaccttggaaatataaaaattatatgaatagatttaccttgaaaaatactttcataaaagtatacatatcacttttcaataaatatttttatagaaataagaagtcaaagttgtgttttggagaccatgtcactgtccaaaacaactttctttacgagtatggagggagtactggttaatataattgcgtttgcagaaaagtcattgcagggtttctcgtaccgggccgcaaaggattcggttaaaactctcatgtttggcatgctaagttagttacttttctatgtagaacaaaataatttctcaagaatgtactacttattatgagtatcaatataattccctttttatctagtagaaaacggttaacagaatcgaagtgtacaaaaacagagaatgctgatctttcccaaattctgaaagatccttgtttggtgtttccgatggaccaggatcgtcctattgttgattaaggttgttgcacgagttcaccagatgcttgcgaagattatacagtctcaatgtctcatcaactgaaactctctgaaaacggctctgtttttttactttccttctttaacgagtggatttgacaggtagtcgtaagagttgaattgtcgtctttgtgctgatgccactaagagaacaaaccactttcgtcacatgtagtacacactttggttgctggataattagatatataaatggcatcttcctagttagttccttcaatcagttggccttaatttgtattttctcctagactcctagtacatttccctcgaataattatgcatgtccactccaattatgcaaaagatcaccacaaaaggatagagagatagaggaagatacccttctatagaacacattaaatgtgatactctattttttttaataaaggatgttaaaatgtaatattctattagtgccagttaaacaaaaactggcacagatacgatttccacccacctaaccatgcatgctctctagataggcggtgccgattccttaacaatccagcatagggaaaaaaacactatcaatgctatattttagatgacctaagaaatcaccgagctagatcaagaattaaaaagtaaagtactcgctctctcccccatctcttgcttctatctccccactcaaaatctcttgccccggatctaatccgtctagagctcagaatcggaccaccatgaggtttggagtgactagacccaccacttgtccgagctcgaggggcccgctcgacggcgggccggcggacttcaccatggtgagcagcgttggctccctcccctgctctctggagttgatcatttggagctcgagactcgctggatcatgctaccatgagcttggggaggcgagatcaagtctccacgaggttgggcgtgaatagatggatgtttttcttgagctcaagactcccgcttgataaacggtgaggtgtcggttgcttcaaaccgacatgggcaggtgggcttctccaccacgtggagtggcgacagtggcctcggcctatggcaccctcttctatgtgtacttatgttatgtttaattcttccaatataatgtgataaatgttgcaactcgatcgctaaagattggttctatatatgatctatttttgtttggagtttttattgttagatttgaagcatcggctcgatttattgagtcggctcaatgcttctttttcttgtttacttgcagatacagattctcacatcagcggaactgagatacattctttacgaaccgacgctgatgagttatactacctccatattttaatgtatgacgccgttgactttttatccaatgtttgaccattcgtcttactcaaaaaatttatgcaattgttatttattttattgtgactagattcatcatcaaatgttctttaaataaaatgaatggtcaaacgttgagatcgaaaagtcaacggtgtcatgcattaaaatacggagggagtacatactactgcagccggtcttgccttctcttctctccacgtccaacaccaccatccagcttgcccgcttctctccgtccgcgtccagttgaattaattcatgttgttacgttgcatttaacttatcgactagagctatttctgtagtttctcaagcaaagagattgaggactgatatgatctaagaaaaaaaatgaattagataatatataaaacaatatgtatgttaatttgacggtttcacggtagtaattaattaataaaggtatctacaggagacaaaaacttctttaggtttaactaagtttgtagaaaattagcaacatatataatattaaattagtttcattaaatgtaccgtaaatatatttttataatatattagttttgtgttaaaaatgttaattcctatatttttctataaatttgatcaaacttacaaaagtttgattagaaaaagtcagaattacttataatacgaaatggaggaagtattagacaactatattcaatttaaaaggaaattaatggtccctccgcttatgacatatatgaaattatcaaatagggaagaaaaagacaggccagtagtgttttttttttgtaaatttatatcttacaaaagtatgtcaggttgatctttgaaattttgtatggttgtctagctaatatcaaattgcctatatgagttttttttaaattacaataattttataaaaaagttctcaagttttttgctcaagttgtgttttaatttccaccatatatttccccttaaggtcctatatggaacacatgagttttacattaaatatacaacaataaatacatttccataatacttaaaatttctccttcgttaagatcgttaacagaaaatgggtctgttcaattatgaaaaaaaatgaaacatttgtggaatttgtatatgcaatgatcaggaaaactcatgcacttcactttcatcactcaagagagatgtccccttacttttctcataccatcaaaattgttataaaaaaatcaattttttttaacaaaatagattaatatgtgatatattactctacaaatatgtatattcaaatccaacaactcaagttataaaaaaatttgatttttttgacaacttatatatagaagtcaaatttctttttgctcttgtcattttttttttgaaaactctttggattatacgtaagcgaaacaatgggatattcctttgagggatgataccaaactgcgcctttgttcccattaattatttgacatctaattcaaacaatctaattctggttaattgaatacaattatatatatgtaatatattcctgtatatagtcattcatttatagttttattatacatatactgcatagccatggagattgaacaacgacacacccaacatcatatccgacaaagctgatcaactcaaattctcactacgcggtgctaaagcagaattaataataattgaacaccaagccataaaataagcaagatcagctagtgcatgcaaatcagctgttattatccacgtgcaatgctcaaattaacacacctgatacacacgatatgatatgacaacataattaatttgatatacaatcatatcatagctagcgtaaatgttttaccgcgtcagagtcaaacatcgatcgaaatggatctctgcctttctctcactcaagtagtgcagtgtacgtgtaaactctgtagctagcgacgaactagtccatttctccatatcacactccaaacaatataccagctgctgctgcaccaacagagcagctggcttgatcatcgccgcgttgacttttggccgtgtcagatagcaagtcaacgcacgagttattaggattaattcaaagctctatagttaaattcatgcatatattgcatgcatgaagacaaactagcactccattgctagtggtggtccgctttgaattcaaaggtgtttgagtgaaattttggctggatatttaattatgttttgaatcgaaatatatatatataggttatgaccatcttgtagctgggtgggaatttcgtcagaagattgcatgcatgcatagcaaccttgaatccttgattagttgctccgtattgcttcctttaatctctgcaccaccctctcaatgcctccatatccatctccaatctgcaaaagcaagatcattagcaaccatttatccctaattaattgcaattaatattggttggtaattgagctgcatgcgtaggaagaagatcagatggatcgctgaccatggcgtggatggtgtagacggccttggcgccggcgacggagaagtgcgcgttctgcacctggccgccggcgtcctcgacggcgcggacggcgcggtggaaggaggcgccgtcggtgggcggcgcgccggtgaagaggatggcgtgcaggccggaccccaggtgctgcacctccacctccggcgcggcggccgtggccgccccggcgccggacgacgacgaggagccgccgccgccgccgccggtgagctccctcttcttctccctcagcatgtccaccctctcctgcgtctgccttatgtactccgccgccacccccaacctgtccggcctcgtcgtcgccgccgccgccccaccctgctcacatcacatcacatcacatcatatatctgtctcctatctaatttaccgtaatctcatgtataccctggtatcaattgctgacaaccttttattttataaggcgtagaattaaacatgatcgcaacacccaaattcaacaataattttttttctatttcgtgactagatgccaaatttaaatattccgtaaatcagttcactacgagaatccgtaattttctttgatggtattttgaatttgaatttgaatgtgaaggaatggaattaactgtggggggagcggagcggacgagggagtcgaggtgggagtagagcttgttcatctgctcgcggcggatgcgctccgtcgtcttccggtcgggcttgccgccgccgcctccgccaccagctgacggcggcgggatctccatgtcgccggaatccgatcgatcagggacgacggccggtgtggacgtggctggccggagctgagagcgagctaggtctcgtggtcgctgtgtgtttgtgttttcctcgtgctccgctgcatatatatataaggttccatagcgggtcgggtctatacccgtttaggtgaattattctagcattaagggcccctttgaaatggaggattaacaaaggaattttggaggattcattttcgtaaggattttttttcccatagagccctttgattcataggaagaggataggaaaacttccataggattgcattcctttgatcaattccataggaaaataagcaaggggttagacctcttgtgaaactttccttttcctttgttgagtgtatcctgtggtgtaatcaaagggctcttctctctattttctgtgttttcaattcctgtaggattggaaaaacatacaacttcaattcctacgttttttctattcctgtgtttttcctatcctgtgtttcaaaggggccctaagtgtactgtcagtgtatgatcaagtcatcgtcaattttactccaggggatcgatcgagtagtcgtagctcgaagaataataatccactttaatcttagcatatttttctcttgattcttactattaatgggctagttcaacggtatctacaaatcaatctacatgtgttgcatggaaagcactagtgatgttgtgatggagtcgtggatgtataactccacccattttataaatattacccacatgcaagcgacctttcaatagaaatttagtgagatcaaggataatgtcgtcgttagtttttgtctcttatattagagcatatgttaagcgcgcttttacgaggtaagtatggtgttatgtatgtagtgatgtatgcacgtatacgtctaccatataatcatacaaaagataacatatatttacatgtgtagtagggtaatcaggatccaatctgacctattaaatacgggttttggagctaatatcatcatagtcttaaggaagtaaaggaaaaaaaatatataattatgcattatcggccaccgtaatatatactccctcatgtcacaattaaattcttaggtttcagacaaattctggttaaactttgactatcattgactttaattacttaatgtgaaatcataaaaatgatataagtagatttaaccttaaataattgttggattttataaacttaattaattattctcatttaaaagagaaaatttttatgtccctgaaatttcagcagatccctttcatacccatgcccatgagttttgccactcccttgtatgctctcgaattttggttttaatcccttctacacttattccattatttgactatcagttgattgtttaatatatgtgaaaatagttgattttttccgttgaacatagaaggaatgtaggaatatgtaaagtctacagtaaaaaattatgtgactacaataattataataatcatatatatgaggttgtattatatatatgtaaggtttaacatatattcacaaaaaggtaagcatagatttttgtagatgctatatagtatagcaatgagactagtataccattttacttatgtactatatacatcaagtgccaaatctgctgtatatatagcaccaaatatatatggtagataccctctttttaatatagatatacagtacattttctttttcattacttaaaaaaataaacttaattaatcatgagtaatatgcacctcgtataacaaactcttaaatataagagtcttgtgcaaacaaactctcttatacctccagcaacacagactcgatccatgaatttatacatattctttccaagcctttgggtatatttgacttttatgccgctattaaattgtcaactaatgaaatatgtatggaaggaatcagaagcaaagttcgagggaatatataagatactaagcaaattaaactcatcagaaggcatgaaaggaatccactggaatttcattagcatgctaggaattttctctaaattaaattatggtcaaactcatagctcgaattgatactctataaaaaagctaaacggtgcgcattttttacgaattaagggagagttgtattcaaccttgatgcgatttgtgtttgccttcagaaattagaatgcctgttaggttaaaaattttctatactgtacacggtccgtccgtacgtccagggtggtatataacgcgttctccaaggaggtactccaaacttaatttagctagagacatatataagtaggacgtctgtatggtcaatctcatagtattaacataggcagagtgttattccactacaacacaagcatcatttaggtagataccattatttatcatatggaaaccttttaaagaaacgctccgatcatatattcgatgccattcgactagctttgactgtaaagttggatcactcctcttatttaaaacaatttatacatatgttatatattttgttatgacttgttttattattaaagttactctagacgtgaactatatttttactaatttttaatagtacaaatgattaaactttatatgttaaaaatcaattgcgtcaactatttatattcggagggagtatatactaagaaagacaacaaatacaaaatgaaaaaaaaaattctggtgaaatttctcagttctacttctcataattaattatttagtcctaatataacacaaaccacagatattcatctgaaccttttttttcaaatatatgtaataaatttgtttgatgattttaattaatttatatcggaaagcacttgtggtgctatactgctacctgctaattaatgcctgaatgcgtgatccacatgtaagactagagaggaccaattgtatacaccaaagtactgaaaaaaaactcaggtgcatgtaatttggacaatggaatgatgggtcgaagagttttcaacaagaaaagctagttcaattggattacaaccatgttcgggtcaaggttttttcaaaataagaaaaaggaaaaagtacgagttacccccccgaagtatcacggtcatccgaattacacccctgaacaacaaaaccggacattcttcacccccaactatgcaaaccagacgaattaccctctggacccaatccgcggtggttttggtctatgtggcagtccagtcagcaatttatttattaaaaaataggtgggccccacatgtaagtctctctctcttatatctcttctatctctcactctctctctctcctcctttagactgcgacaacggaggcagcggcgcggcggcgagccgagcacgacggcggagaggcgagcgaggtgacggcggcggaggaggcagcggtgaggcgaggcgaggcggcggcggaggaggcagcggtgaggcgacacgaggcggcggcgaaggaggcagcggcgaggcgaggcgaggcggcggcgaaggaggcgagcagcagcggcggcgagacggttggcggggagacgacgtcgccgtgaggaggcgagcgcggcggtggaggaggcgaggtagtagtggcggcgaggcggttggcgggtgtggctgggtggcgacgggcggcgcgaggcgaggcggctgcgcgagtagaggaggcagcgtgagacgagaaggctgcaacgtcgtcccccgccaaccgcctcgccgccgctgccgcctcgcctccgtctccttgccgccgcccacgcccttttgcgcctcgcctccgtctccttgccgacttcgccatcgccgctcgcctcgcccacgtggtcgtcggacaggagcggagcagtggcgagcacctgcatcatgcggaggaggacggcctcctcggcacacgggtgggagaggggagagaagccgccgccgccgctcgcacccgccccagcgccgccctgcctcgccgccgccgcctcgcctcctccgaccccgccacctcgcctcctccgctcccgtcgctcgcctcgccgccgtgcctcctctgcccccgccgccgcttcgcctcctccgcccccgccgctcgcctcaccgccgcgctcgcctctccgccgccgcctcgccttctccgctcccgtcgctcgcctcgccgccgcgcctcctctgccgccgccgctgccgcctcgcctcctccgcccccgccgctcgcctcgccgccgcgcctcctcctccgccgccgccgccgtgctcgcctcgccgcgccgtctgaaagaggggagagagagactcgcctcgccgtctgaaaggaggagatagaagagatagatgagagatagactgacaggtggggcccacctattttttaataaaaaaatgctgactggactgccacgtagaccaaaaccaccgcagattgggtccagggggtaatttgtccggtttgtatagttgggagtgaagaatgtccggttttgtggttcaggggtgtaattcagacgacagcgatacttcggggggtaattcgtactttttcctaagaaaaaagaaaagtctgtatccggtggaattaactggacacaacacaatttgtttttaactggtaaccagctagctgacaataaacgtctagaatattttaaatttaaattcaaatacttgcagatacgaatattttaacttggtcacagccgataaccaacacatatatataaaacgactgctctattgtcaacccacctgcttttggctttcgcacaatatatatcatgcatatttaattatgtaaaattatggagagttcgatactccctttatcagcgtgtgtacgccaatggcgggattcggcgagacccgcttctgcaagttcagccaagaggttagctaggcacgtgtgatgggaagcagggtccctgtttaatgcggaaacaaatgagcaagaaagagttacacgagattttacaagtatatcagctactcaatagtttctctttctttctcttctggattctccaaggaatttcaaggtatgtatctaagtgtttccctcatccaattggtctcggttctcctctattatacttttccggcgggacaccacatgaccgaaattcgaggaaggggttaactttacagggatttggtatgggaagtcttgtcatcaaccctccttctcgcgcgctctaccggccttggggcaggcccgaatagggcccagtgggaatggagcatagcgagagcctgtcaccccccaccccgccgctcgatccatgcagtcaagcataaatagggattacccgtgtcgtcttgttagtggggcccgtagtaggtatctggtaaggatggtaaaagaggtagccctggcgggggcttggtagtcaaccacatcccttggtttcacacccccttgttagggcaaacaaagggcaaagtgacgagcgccaggcataatagtcgccaccctgtttttcacacaccttgccccaaggtagacaaatgtcttgtcaccaatagatgggaaagcatcagggacctcgagtcaagctgagttacgtgttacaacctctttcatcaggacgccggccttgggctccccccgaggtccccatgggaatctgtccatgcattttgagatttttttttgaacgatcagcaccagacagtgagatgattcattgaatagagaaaaaattacaaggttagagcactggaaggcaatagccaggaatgaggaaaaaaatccaccaccatgcacccacgtacctacacatagctagggaaaaggcttagcactggatcagccgctgctaaaccaacaagggaactacagccgagaatgcccaaaaccaagccctaacaattgagcactaaacttaactctagccacatctttgggattgagggggagaggttgagagggaagaatggacaaactgctctccccctaaggccctccaacgtggtcaacttgcataagttagggcaccgccacaagaggacaagacatctagagtgagcttgcaccagttgtctgggaaaagttttggcaagggggcttgttagacgacgtctccaaggagaggaacgacgatggcactgccatcatcgtccattgaggtctcaaggagaaccaagacagggttttgacttgacagctctacaagaggagagaggacaactcgacaacgcccccaagtgggaagacgatgcccaaaacactatcggtgccaactctgccaagaccgggctacgtttacacccgtcatccgaccacctgctgattgaaagctaacactccattgctccacccaccatccatcctccatcggcgaatggacactgctacacctacgcctcctataggccagtctcagcgtgcttcagcgcggccttccgctctccacaccggacagccgtcgggactccgtcaccactagccgcgcctccttgcgctgctttggcctccgccaccgccaccaccggccacgtttgcatgcgatgcaccagcctcccctacccctgctctatcacccgcgcgtgcaacaagcctctggcctctgccacagtctcctgtcgccatcgtcttgttgtgccatctccttcggtcagatctggtagtggtggcgccagatccagcagctgggggggggggcagattcggccacggcggtgctggagtcgccgcctcgagccgcaccaccacgcggcttgccacgcgtgccttttcggctcacaccagacgtagggtgcttcgggaagggggggtttgaccccgccaccaccatcccggcaggccgcgtagtttctgcgagtggacgacacgaggggctgtattgtagaccatcattttgagatgggccatgtgccatctctgggttggtcccccgattgtcaacaagcttggggagagctgctaattaagcacctaactacagatattttcgcacgtggcacataacctcaagtattatggcataaagttttacaaaccatactattaatcattttgaatttaatctactacactttcgagttctataattgcatcttaaatttatgaattctatatccattatatgaatgttacataagcatagcctttttaaattttaacattggagtttgtcaaattgctaacggcgtggttctgtgaaactttagaaccataatacccagggttatatatatgccatgtgccaaaatccatgtggtttatgtaacttggaccataataggcggagtattatgaaatttactcaaatttaaataataagtgattgattagtactctacattaatgctatttgtgaacaagtagaaatttatgggtatgattctacataccatatgcatggttaaaatcatgtaacaataatgtggatgtatttttcatataaatttcgtgaggttaggaatttcgtttctatctgtaaagcgtgggttaatatatagatgcactcacattatcttcgttttgaaaattttatttttcttggccaaaaataatgtttgaaatcggaggacataacgcttggcatgcgaaaaattcaattttatttttcgcatgcggttggattgaacgcgcatgggaaaatcgctgtttttaaagcagttgcctgggtgtgggcaggtgctacacctgactgtgagaatgcaatctaacggtatgcagaaagtgtttctgcattagtgaacttgacacgacactgatggcatatattgctgcttaatttggcaccgacccctgtatgcatatgcagtgcacagattagtttggtttgatgagacattctgatcattgcacaatttctaaacgtgcgccgcgcgcgcgtacgcactattgcttgctgactatacgtactccgccagcagccactgtaattaaggaacgtgtggaacttctctctggctgtcatatgaacagtaatcctaagtagttaatgatatttctctcttattttattaagccacatcacctcgattatttttagccctaggatgatacaactatggttcaaattgtctcttcttcttctctcataaaaccatgaaatcttaattatttttaggctcaaaattataatttattttaattttgataatcatattagatattatttttacatattaagtaacttaatttttcgtagcaatcgtggtcgggtattcatctaattaattagtaataagaacgtgcaataactagtagcgatcctgattttgtagtatgtgtgactgtgtatgcatggattgcggctggttttcttgctcaacgatcgcagaccagatgttacggctgcctgaaaaaggccaggccagccggtttggcagctatattagctttaattatttttcagttgaaatgagaaatgttccctccaacgcaatcaatcacagttgggacgagcaatcgcgctcatgaaagaaattgtcgtaaatggatggcagttgttaatttgcacaccgatgatcaacattgcctcggaggaagtgttttttttctcttgtgaggttgagagaattttctatcgttttttatgccaatttattaatgaaaataatttaaaaaaattagcaatatagaatgtaatgtgccactatacaattaattatacatgtttaaatatcaaggaaatttgtaaaaaaaaactaccatataaattatttatggaaataattataaaaaattaacaatatagattaatatgtaatgtgccactatacaattatatatgtttaaataaatcacttgaggtttgatattccacggcacaagtcatttttttgcaaatacccacccttactctttttgttgcaaaaaccacccgagtgtgtacgtgattaacagaattaacatgtttttataaattaagtcgtcaatgtgtttttttatcaaaaataaatatttataggagtatattgttgacacttttcttagagattccataaatagaattgctaatgagagcttaaatattgttgcactaagtttcgcgatatgcataaataaattcaatgagatatgaaaaataagtttaatgcaaacactttaacaagattgacttaactaacttagcaaatatcactctgattcggttaagcacatgtgtaacgggatggttttccaagaaaactgggtaggagggtgtgggcattctcaacaaaatcactcatgggtagaatgttacttatcgggtggttttacattttttattaaatatatcacttttgcaagttataacaatataataattataaatgtacatgtacgagttctagacttctagtttggaattacatgtttgtgtagatatattttgtagtaatcttgtcaattttttcaaaatatttttataattatttaggtaacatgcaaaaagagaggatagaccttattatctccattatctcgatccagttcgttcttagttttaatttgacccgccacgttctctagctagctaatgctctttcagctttcagttctcagtttttcaccagaaagtaatgacgtttatgcgttttgtatgcatacgtaatgatccatctttccttctttctgtgatccatcaaagttgccatgaaatgatgggtcatatcggtgcatgcatctgcacgcaattctgcattagattcaatcgacgcaacgatgcagcagagagaagacgtacttgtctctctctcgatcaggagttcatcgagagactactactggacgatccggatcgatcgatcggtcaggtcagtcggtctcgcggccggaggtagaagacgacgatgacgacgaccgctgactagctagcgagctggccggcgtccgtcaccggcggtgagaatacactgcagtcgtctgcgaaaccgaacctcttgacctctctagctccaaacaaattgcatccatatttgcaacgcaatcgaggaccaccatatcacaaattcacaacgtcgacgtcgtcgtctcctctagcttttttaaatgcggggcctcgttaatttgttctcttcctcacgctgcccgcccgccgtcggatcatgatcggacgtcgatccatcgtcgccggacctcgccgccgatggaacagcggtgtggacaagcagctacctgatcatacctaccttcaattctcgtctctctctccatcgagctaatttaaggttttttcttgtttaatttggccggcgcatatacgctatctacatagtacgtacattggacttttgggggaaaaaggcaagaacaattcaagcaaaagctggaattatttcccccccttttcttttagtttcctttaatttcttcgatcggaatatatctctcgagtcaagcgatcgatgacgaatgcagttgttactcccagatgatgatctatggccgtgacgtgatcgtatgtaagcaggcgggcagctggcagcaacgtcgttttctcaggtatagtggcgacgacaattgtggcttctggttgataccttacttcccaaactcagctagcttaattagatagggattttttggtggtcaattcagcgacgaccagaaagaatattattatccgtctcactttgctgttaattactatatattccactgctgtaatattgttggaataaaggaggcaacttgttccatggatctatcaagacaaaggccatataagacaattttattaacagctccaaaatttaatttttttttaaaaaatatatatatctagaatattagaattaacctttcattccatctcactttctattctattaatttaatacctttcaagttaaaaattattaaatacaaattgtagatgccccgagtttatatttagtttctactatggtattcataaataaaaagttatacttgcatgaatctcacaatttaaaaagttatacagatccaaactttagtctcgattatcttagtgccacataagtcgcacaattttttcttttcatgaaaacaacatgtgaaataggagactgaaacctaggagctcttttatatgtctatacatagtcaacttactatatatctcattacacggacgcggaacctctcatgtaactttaggttactttgtgtcaattttttttaacaaaatacgtaaaagctttgcacgtcaacatatcgtgatagtcttcgggtttttttgaggaagagaactaggtaactaaaactaagtaaagggcttaaccccgacaataagaaaccaaacccgaagaacagaagcaagggaacaggaggaaggctttatatgtcacactgatatgtgggtctagcttgctatgaggccacattgtagtgacaaaaggtcaggtgacgtatatatgtcacatgatctcatttcctcactacacatcaatattgctagcatcagcatgattaattttagttccttttaatttcacccttcttgtccggatcaacttctaacgcatattaatatccctgctgatccaattccaattttcaatttttttttttggttccgtccctttttcttattgatgtctgtacgtgtacaagtagtagcgttttccctaattgaactacaattaaagttcaatgtacatgcctcaattaagctattgcacttgacttttttttttcgaatgcgcaaaaagattacacgttaatatattaaaagaaaagagttatagttacacaaccgcactcagaccggcttatgcatgttttttttttatttttactctgctattactgcactcgacatgttcccaccataaagaaatccacttaatattttcaaaatagtccatcagattctattatttacatacattatcataacagaatcatttagtgcccatagccggagttgaattgggtgcttactgttgggatatataataggacagacgtcgtcgtttcagatcaagtacggatgatttattcgcacataaatgttgtaacaaatttatacgtgtgtgcagataaggaaatgcgtgctaatcgatcgatgttgcgtgagcacgagtcaacagacacgcagcatctatccctttgcaactctgcttccagctttttggattggaggcaacaaaagcgctgctaattaccaatcgatcgatcaccatctggtgttggttgacgactaacgagatgattttattggctagctagggtcgtagctagtgcgcaacacaacagcacaaatcgcgatatgtatgtatcgactttgcataatatggtggaatatataatattccttgttcccagtccaccctgcgtagcatctcactagtagaaaaagggttttcgcaggctcctcgtttatttcacaagaggagaaaaacatgaaacacttactttgaggctactctagtgggggtatagagctatccgtgtaaacggaataccacggatgaccgattaaggtagctgcctgtgaaaattatttatgtattccggaacgactgccttagtagaccgctcgtggtaacacgattttcgcagatgtctcaagacaccgactatgaaaatgtgtttatatgcatgggcgacgcaatttagacgccgcccgtgtccataacattttctaggcggcgtgctcgcaaatacccgcatgtatgttgtttggttgtcttcctcgcactactatttcgcgtacctccattatcattggttttcgtgtgaactccttggaagacgaacagctggacaccggtcatgtccttcactgtcacgccacgcttcctcacttcccacaccacgactattttccagcgtacctccattatcattggttttcgtgtgaactccttggaagacgaccagctggacaccggtcatgtccttcactgtcacgccacgcttcctcacttcccacaccacgactattttccagcgtacttccattatcattggttttcgtgtgaactccttggaagacgaacagctggacaccggtcatgtccttcactgtcacgccacgcttcctcacttcccacaccacgactattttccaataaggagagggcaattaatgggggttttctcgcgtgctttacctctctccacttcatccacctttctccaccctcgccggcaatgaatgactcacaacaccagccgtagtacaacaccaccaatggggaggagaacaacgatagggcaccaccgattaggacaccaccatattgttgttggccatattgcagggcgaaatacctggcaatgagtgggatagcgaggatgatcagtggtacaacaagtctccacaaaaatacttcgacgaagactctcaatcagaggagctgagggggactacgatgacaacgacaaaagcgtcgataaagagaagtcagtcgccatggttgcggcgacagctgataggagaggtctacgcgggccacactgacgacacaccgtcaagaaggaggtgcgacctaaggcggagccggtgccggaggggccatagcgcggccgaggtgctggaggggccatagcctagccgaggtgccaaagttgggcagcaccgacgtcgtggcaccgttagacgagccatcgtgcagctaggaggagccgttgatggaagcgtaggcgaagaagaaggtgtggcaccagccccccagcaccggcccccaacgcatgctccagcactgggctagctgtcagcgcccgctcaacaacgtactaattagttagattatatatatatatatatatatatatatatatatatatatatatatatatatatatatatatatatatatacactagaaaaatgcccgtgtgttgcaacgggcgaaggctattttaatcttattgttgttcactgaaattcacagtgagaatacacttagatatatatttttctagaaaatcatgtcaagttagtatgcgagttttttttaaagagatttcttatataactccttttgtatttccaaaagcaaacgaacttaaaactcgactcaaatacgaatgtgtattttcaaaagcgaacgaacttaaaaaccgactcatacacggataacgtaccaaattgtcggcaaaaacatcttcaatctttataacagtagagatatacaactacgattgtgtgcggaaaatgtaaaaggtaaatagtgatgaatttgataaggattgagcaattcatttttttttcttttggagagttgaagatgaatcataccaattatcaatcaggaaaaattttgaatgtcaatagaataaaattcttctgatctaagtttgactattaatttctatatggtagtattttttgaaaaaaatgaaaatctaaacatatgatttttcatatatctggctagcttaaattatcaaaagttttaaatatgtatttttatgggaatgttgacttaatatgtaagtataaagttggccagggtagttagttgataaagaagcagggacttgcaaagaatatatgagttggtaaaattatgtacgttcattagggctgcttagctaggtgggctgctcgtgcgacatggcgtctgccccagatggcccaggtggatgtgtatgtacacctgcatgacgcacctagcgagtcgagtccgttggagactaaccgcgtgacgtagaaaagaaaatcggatagggagaagaagaaagcgacgtacgaaatatttggcaaaaacatcttaaacttttataatagataaagataaagataggcctggaaaataataagtaagcctcaatatttagattaggaagaacattttgcattggaatatatcatcataatttctagtaagttaaatcttttgtacaaattaaaatttggcctattatttttttagaggcggaggagttgccgccgcaggaggaggaggaggaggaggaggaggggggcaaggagaagggaaaggacgaagcggcggccggggactatcttcgtgctcgagagggcctgcctcaaggttggcaaagtcggcaagatatggggggaagctaattacaacgttttcttgcgcttcttcattttttttttattttttgccatcaatccgttctggctttagatagttgggttagttttctgttcatatttatgcttgcttagcatcgataaatttgatcacgagtggacctgcatggatggctcgagatgatctggctgtatatatagtttgtcaactaattagctgtattatatctctatatagttgtgatgattgaagaacttaattctacacgaatatacttttaacggttctttttaacactttgtgtagactatatgcaaatcatggactcggatgatctatttctggttttgcgatctcgactgaaaattgagggagtctaaatgaactttttgcacctgaaatgacgtcgtcggatattaagcccaagctgccggacagattaccaggcgcgcttgatgggccaccttcacgcactcaagcttttcgatcagtatgggccgtaagtttccgacatcccttaccgatcggacggcccacatggattgtggttgcttaattaacgatggagacaaagtcttaattgattttgtgctttctttctctgcaggaagttgtatgcacgggcatcttttcgaaaactaaataaagttacataatactctctctatttcaaaatctatgactgttgataaaaaacacgaggcctgggagatctgcttaactccagtgcaggtccaacactcgtcttcgggtatactagtgtgccagttgatttgatcctataatcaacaagaaacaaagacacggtaaccgcggttaaatccataaatgatagccgatcggctaattgccgatgacatatcatttacctctgagccgatgtcatacgtaaatcgatcggcaattggaaatagataataaagaactaaatctattcgatcggctgtagatattaacaatatataattcttatatcgacatatacttaaatcaagtgattgtgatagatcagtcgctatgccgagacagtataaatcacttagattgaaatatatgttaataacagaactatatatgtttacagcataaccgatcagatggatctagcatgtatcggctaatactccgatacaactctatgttaggatattaaaacaagcagaatataccaaacagaagcttaatatacgtaaatgcaataatatcctgacataaagggcagatttaacatatcaacggagcatgtggagcaaatgtagttaaatcagataagatcggctgaaactccgatgctaccctaatcgacaaccagaaagcaggctagagattgatattctaagcacgacttaatagatcaaactcaactgatacagcattaagtatgaaaagaaaaacaatatctagacaatcaagccgctggaagtttcatagagtggtagatatcttatataatctgagtcgatgtcaaaatctaacctaatcggctgccctcttcgacagatgttagccgattgtagattagatagcggtattgccagagattatataaaatatatgataactcgacgaattacataaacaagattagagtgtcataaagatggaagcactaatcccgagaatgcaagccgtcataacaagttttacctcttgtttaagatcgaaactgatgcagctcaacccgaaagcaagaactcgtcgaaataaaactaaagcaaaaaggtggcaatgcgccgaaattgtattgaacgtgtgtgttacttgattacatggggttcgggatctatttatacccgaaaattacaaacaatgtccatattggatacgactcttatctctaacaaattctaagataccataagtctttacggcagacttttgcccaagcatatctataaggaaattacataaaatatcctaattaatagatacaattgccttctcaggactctatccatgtgcggcaatcatcttaaagcacctcaattcaacccgatgtcatacatcaagtcgtattgtcggaattggctgcatcggcttacctagtccgactcagacccagccgatcctaatcgtagccgatctggactccagccgattcctgctctgttctcgaatcgatctccgccttcgactccacttcgatctaatcttcttttccgatgccgatattaccaaatttggttgttaacaatgacacagttaacttttcacgtgacgtctgatcattcattctattaaaaaaattatatagatatcatttatgttagtgtgacttggtttattatcaaataaaatatagtattaacttatacttttgtatatttatactaatgtttttaataagacaaatgtttatattctagtataaaaagttaactacgtcatacattgaagacaatatattatagtatgacatattatttaaatttaaacatatagtacgtaggcctgcttgctatgtctggaatattgtccatgcaaccatgaagtcaatgtgacagtaggtgaggtttcaccctcctcagagaggaaaagcatatattagtatggtactctctccgtcctataaaaaatccattcctagcatcccaaggtagaattagtggagatagagaataactaaaatgctcttaatctttaataaaaatagtaagataaaacttctcgttttacgtgtcgagggtaggttggatggtagaagttgatttttggtgggataaaatttaaactctaaaagttttttttttctgacgaagggagtacgtatcaaagtcactgatcaagatcaactgctgcttgcaatgcaagctagctatataagctgcattgcctcgtcgtcgtcgatcaatatagcgaccctcttaattattggccgactatatattaatcagcttttgctgatcagcatctttaatttcatttcgtttcattatatttctcgcggcaatgaatgaattcgacctacaaatatacacgcatatactattgcctagctatatatacctaggtacgtatatatacaagatgcgtgcccgcacaagttaaaccacttattacttcgtcctaaattaaattttagctatttttgcttcgatagatcgatgtcgcaagggattaattaattactgtgcttaattgagtaatacttaactagtgccaattgagcatggatatgtagtatagtatacgatctaggaacgtccttacgtagtatgcatgcatgagtggaatagtcggctgaatgcaatgggtggagtcgctgtcgccgattatcaactattttgtgacctctccatctcaattagatggtgtgtactctctctctaatcttagggtcagctagctagatccgatcataatctccatggatggcaacagctattatattctcatctattagtttggggccagatcatgctgccatggcatggggattacttgtcaattacgtacagtgaagaatttttcatgtttcaggtggagcatgcatattgtggggccaggctaatgagagatctagtagctaattgaactctaggtatttaggtagcaacatatatttgtccttgtgttcacagcaaattgcttacaaccacatgcatggagaggctagctatctggagctttttttctctccttttttttttctgttggaaacgacagataattttagccggaaggtgtactacataggaacccttatattcatgagtcgtttgattaattcaatcatcttaaaatttgaatacaattaaggaagttattgaatatacaatacctatatagctgctcgtacaaaatgtctagaggttaagatactggtgctgtgggtaccccggataatataatgtctagtgtttaacgcgaccatcacacgtatttgaatgagtgggatccattcacatataaatagtcactcatcctcagtgtgtccatgatcacggttgaaacctttcaatgtattaatcatgatgtcgagtagtgaagtaacagagatttttgatagaataacttgccagttacttttaacctaagaatgcccatcaaatcactcaatgacaacgaccaaatgtgttacagctccaatacactttgtttttggttatataggagaatacagttgcagctacttgcagtacttctaacggctcgatacatatatagctggaagcagaaggcgtaacctatcgcagctgttgcacaattgatcgatccaaaattccaaatgcatattgcaagaatcgactagactagactactgaagcgtctctctctctctctctctctctctctccctgcatgcttgttgctgtgtgtctctttctgctgtgttttgcaacagctggtaaattaaattaatccagggatcaaccaatcaaacatcgatggtttgtgtgcatgcttgcatggcatcacaatatagctatagatctggtcatgctcacacatgtgtatgtgtgtgtgtatatatatagagagaatccactcagtgccattgagttttcactacttctacaatataccactgactttgtcaagttgaataatatgccatcgtgttttcccgaacgtctactgcgtgccatcacagtccagaagctgttagttgggcatctgttagagctgtaaaaagacctatttgcccctaactcattgtacatgtttttttttttttgccgagggacatatgtattatatgaatacatatagagaaactgattgaatcatataacagcctatgattgctagcttcacgcgttggtagagacgtagtgaactagtgatctgttgactttgaaatgggacatatcggaaaaaaataaatgtacataatgaaaaaaaaaatcaaccccatacagttagatataaaacaagtttgaacatggtgcatggcactgagctcatatagatatagaaatgaataccaaaatattttactaaaacaggtgctagggtttattagtcatgggcattttagtcattaagaaaaaattcaatacaccaaacggatgcaccctaacggcttgtggacggcgatggcacgcagtagacgttcgggaaaactcgatggcatattattcaatttgacaaagtcagtggtatattgtagaagtggtagaaactcagtggcactgagtggattctctcatatatatatatatatatatatatatatatatatatatatatgtatatatatatatgtatatatgtatataggcaacatatcctatgcacacaggccctcacgtgtacacacgtgtacaccaactaaaaaatatcaccaaaaaatttagaaaaaatcatacccatactttcaattgtattacacctagggttaaaatcttaacgtcaaattcattatattttagtcgtaacaaaaaaaacaaaaaatctgacagttttaaggttataattttgtaagaattttatcttttttgttattctctatgtagaatgaatttgaagatgcgactttgcacgtagatgtaatactattgaaagtacatgtatgaattttcctagaattttttataataatttttagttggtgtatacggtgtgtacacgcgagggcctgtgtgcatagtatacgctcccatgtatatatgtatatatgtatatatatgtatgtatgtatatgtgtatatatgtatatgtgtatatatgtatgtatgtatatgtgtatatatgtatatatatatatatatgtatgtatatatatatatatatatatatgtatatatatatatatatgtatatatatatatatatatgtatatatatatatatatatatatatatatatatatatatatatatagacacacacacacatggtcatcatgttaacatgtgtgtgtgttcatcatggtcctgtcatttccatttcacggaagccgctttttgaccagtagtacgtgctgccggtgctcctgttaacatgtcgatcgagacacgatccatctgtcatactacctccgtcccaaaataagtgcagttttacactatttacgttcaacgtttgactgtccgttttatttgaaaaatttgtgaaaaaattaaaaacatttagtcacacataaagtattattcatgttttatcatctaatagcaataaaaatactaatcataaaaatttttcaaataagacggacggtcaaacgttgaacatgaatagtgcaaaactgcacttattttgggacggagggagtactaaggatggaaaaagaacactcgaaacttgtgacttaataattagattggtgttgtgaaaggacatgtagcgcagcgatttgaatagaacccaagctagatcaattaaatttcagattagattgtttgaggggctaagttaatttctaatttaaaaggtcgtatacatccggtatgtagataccgggtaaaacaatacttttctccaaaaagttagatttgtttattaaaagctcagctcggattgactcgaactcgtagtgtagtcataagtgagctaaactttactaaccagttagctcacgaggttaacaatccatcctaattttccgagccaagctaggtttttagctcgttaaaggttaagctgtcttgttatgggccaccatctcattttgagaacgggaaagtgtgtgaaactgatcgtttttgcatcagctatagtgaattggctgacgtgcgtgcacacgtagccacacgttggcatgcatataaaatatgcaggaattggaactggggcatatttgaaaagtaaaaataaaaaaaagaaggcctaaattaaagcatctgcggaaaggtctagatgggggtcgacaaaaacagtggcgaatttcgtcgtggtccttgatcagcagaaaaaggatcttgtcataaacgggacgaaaaagatgatctcttgtcgatagcaaaacagttgcgtaggtcaagggtactgtggcctaccgatcttgatatttcttaattaagaggaaaaaaaataattacttaaagcgtgcactccaagtgttcgagattaatatatggaccactgcaaggttctaattgagattgcgatgcatggatatattgttttcactgtgattttgtggacttatgacatggatgttaaaagctctattggtatgcagttgatttcttaggatttttaacatgaaaaaatgcatttaattgctagtataaaatccctacatttcaaaggagctgtaaccactggctaaggctctgttcgtatgtcgtggtttccaactccctctgtcttattttccgtgcgtacgcttcccaaactgctaaacagtgctttttttaaaaagttttcatacgaaagttggttaaaaaaatcatattgatttatttttttaaaaaatagctaatacttaattaaacgcgtgctaatggaccgctctgttttctgtgcacaggagatgggttcccaacccattccagcgaacacagcctaagacgttcaaaggttggccttctcaaacaacaaatatactccctccgtttcgaaatgtttgacgccattgactttttatcacatgtttgaccgttcgttttattcaaaaaatttaagtaattattaattcttttcctatcatttaagtatatagcaggctaattaaatagagttataatagtgtacacatgggagcaaataattagaccatcctaaaacagttatatctggagagatttaaaaatctttgttatttgcacaatctaaaaaaggatcattaatttgtggtcgtttatatttaaattttcacagatgtaaacgtgtgagggttagttatggatcatgaacggcaggcgcctgcagacagatcgatcgacaagaagccgacgcatcacctctcacctcaagctccgatccatccatacaaatgcaatgcccctccttttttccttcctccatagaagctggccccctacatgcgtgagtggtcaaatccaaaaacgactcgtgtttgcggtttgcgtgatgttagccagccatgcaccttttcatgcaggctttgtcgacacacgcttactactcgtcgactgtcgacacacttggctttggcaaataggaattaattgaattaatttatttagttgtttgggatctcagtattaacagtataactttagttatttctaataatatatatcagttttgctagaaatatggtgtcacattttgacttgatttcagtccttttttttttttttgccctatgtgattgctatgtctcctatatgtatatgtaagtatgctgcttctcttttaaataagcaatcaattgagatgtgagcatagctcaaccgattaggtttcttgtggtggaatcagctcacccatgttcaaattctagatttgacacaggtgatcgcatttatggctaattattctttcagtgttaggcaatgtatccatcaacagcgagacatctacttattctttcagtaacaggtgacgtacctgtgaatagcgaggcacccgtgatagttattttttcaatgtaggcgatgtacacgtcaacagcgaggcgtctgtcatgacttcatcatcttgagatttgcttgcctagtcttacggaggtgtagtcttccggaggtgctcataggggtagagtgtgcatatacgttcatagtggtgagcgtgcgcgcattgtgggtgcctacatttgaactgtgtttctaattaaaaaaagtaggcaatcaattatttttaattctaattctcttattcattatgtattaaaaaattacgacaataatatgggttgctcagttggcagagagttgccaagggagtaagctattggctagggttaatttgatcccaggtactcatcagtcatcaccttccaaaaacaccttcaaagcttaacggtatgattagaattttacaaaatttcagtatcacctagccaatttcatgtatagcaatgccattttttcaatgtggcaaatttacaaaggcataggtcatttaaccttcatactaagcccctctttagtgcctccactttcctttcaaaataatttaaaagttaatgtataaactaaatcttatagtgtaattaccgcctaagttttgatttttacattgtaattacaatgtaagtgtacgtagaaatatatctattaatctcattttcatgcacgacagcgctccctttaacttatcaattaattctacgagattggagaaagcagttaataactaataatgcctacattctcatatatatacatagattattttcctctccaaatatacatagataatttgatgatgtcatagaatatctatgcagccaaaccacaaaatcttaaactgttaatatagacagaaacaataggatttgtattgatatgtaaaaatgatattaatagattattcattgtgaaaaaaatatttcatatagttatattgtaataatttttataaatagtttccaaaaacaatagagaccgcgtcgatgcctatctatactttctataaagttaaatcccacttagtctaaaactcaacatgcaaccattccatatcatcgaccaatagcaataatacctcatgcaagcatacaacattatctacaatttatttaattctacaaatcaacatgcaaacatatctaatcatcatctctcatatcatttgcacaatattttaataaatatatctatcacttttacaatatttaacatatacttattaatgtgtttaagactaaagcaccagtatcatttgacagataaaccctaatatttttttttctttttactcctagattgattgtcaaaaaaaaaatttattgagaattgcatacgcagtcaagcgcggggaatcagctagtaacgtcaaataaaaaataacggagatagcagttcaaggaggaaattagtaattacagtcactctctttgggatcacgcgattggcatctgggcattcctgtccctgtccccggttaatttgtcacacgcggacgcggtccattaaatattcgcaacaacaacgtatatatacaatctcaaagctcttttaatttaatttggtcggcaatccaatttacttttgcacttttgcatttgaaatgagtggcatttgaaaaacaaccacttaattatttgttggcctttacggagcgaataatcatcctttttctcgggttggtgttacgttttcttctgtgttaattaactttgtttgtgcgcagggatatgtatgattggacctttttttggtcatgcttcatccagtgcttatgcattggattttcatggacaaattaatatgtatgttattgtacgcttgaggagtgaggacaaacatatgcgacctgtacggacaataatatgcatgcacattattgtggagatcaatcatgcattcaacatttacagaaacctactccctccgtttcaaaatgtttgacaccgttaactttttagcatatgtttgaccgttcgtcttattaaaaaaaattgttaaatatgtaaaactatatgtatacatgaaagtatatttaacgatgaatcaaatgatatgaaaagaataaataattacttaaatttttttaataagacgaatggtcaaacacgtacttaaaaaatcaatggtgtcaaacattttgaaacggagggagtatataggtagatactaatctagcatcaaaccagagtcaagcacgcctagctagctatctgcatgtcaagccaaatcgatcaccccccaaacatgagcatatatgcacaatatatatcatccacctaatattatcctcgttttccttatacctaacatggctatatataagatgcaatttcacctttacatattggaatttttaattacaatgtacaccatcttcaaaaaaaaaaacaagttctagttatgaatctagacattgtctatccaaatttataactaggaaccttttttctttgaacgaagggtgtattgtctatttttaaatttatgatgttgtttacttgcggatatattgaccagctgtcttaactgtccataaggattatgtatttttttacatgtttttatcattaaagacactttaaatatgacgtaatttttatatttacactaattaaaattttagaataagttgaatggtaaaaaacgctcatgagtcgattgtgtcatatatttataaaacagatggagaaccaataaaattataatgcgtatgaaaattttaaaagtgagtcaattcgtaaccacattaaaggtgtgtttggttgctggttacactttaccacaattaaggttagacaagttgtggtagccacaaaaatgtggtggataaattgctatgccacaaaagtgtgataaagttggcaaaaaaaaagagtctataacttgtgggacaatgttattgaaaagtgtggcaagccacaattgtaatataaaccaaacacatgtctaacaaactgtaagtacctaaaagtgtggaagtgtggccataaaccaaacatcccctaagactatgtctggtttaggtctttaaacatattatttctgcaaattatttactcaagaaattaacttaataaataacttaaaacattggtgtaattaatgaaatagaagaaagtaaacatagtttttaaagcccgaagcgataattaatctattttaaacctggcttaattaagatagtttttgccttatttgtgatcaaactaacccctcatataggaaaagattgacagcatagattactaaataagaacgaagacattatatataaacaaatcattaaccctcatcaactagataattgtctttgatctgtaattaacgtcagtaaatcatgcaattagcttcatggattacatggggacgctagcttgccggcatatatataactggaaagatctgctcatctgcatgccttttctgacagggactcttgccgtactgtcgacgagcaaaactagggtgccgacaaataatggggaggacattatttactcagaacatcgatcgaaactccagtaaattatagatgcattcaactactttgcttaagcaaatattaaaccgatgaatcgcctgggcctgcaagttttgataagttaattaattgccaattaggtctatatatatatatagagagagagagagagataagttgacataaacaagaagttctttaattcgggctagcaaccagtacactgtcaataattccgattaattcacgaggaatgatatatatcaaccattactatatttaagaaaaaaaagccatcgaggtgctgtttatttgtgacattattaatgttttagactaatgtgaagttcggactgtttccaaaacatattaacagtccctgcatccgtgccaattgctctttctgaattcaaggacttatttagttgggaaaaattttgggtttgattattgttacatcaaatatacggacacacatttaaagtattaaacatagtctaataataaacaaatcatatatcccgtcaggaaactgcgagacgaatttattaagcctaattaatctgtcattagcaaatatttactataggaccatattgtcaaatcatggcgcaattaagcttaaaagatttgtcttgcaatttacacgtaatctgtgtaattggtttttttgttttgtctatatttaatactttatgtatgtgtacaaacattcaatgtgatgatgtaaaattctttgttttgataactaaacagggccaaattaaccgagcgttgttgacgtacgctgacatcacgacacacgtcatcatgccagaggaagcttgctagctaggctaggcggccatgaaagaaagagaacagaatgggttgtcaggtcccacttgtacaccgtcaaaataataattctcacagtggtgatgctgtttaactaggcaggcatgtacagctagtacagaataatttcatttcagattcttcatctgcaacagctgccgattcatgcatgcatatatatagcgcatcacatgcatattttggaaattaattactgttgaatccacgaaccacatatgaagtatagctaaattcttttccctcttttagaggacacatttctcttttttaaaattttgaagacaagattatacttatacagctgtggtgtctaattgggccttaggcttttggcggcccagtagtaggttgagattctgcttgatggattctttctagaatctggactttctagtcattctaattaattgattactgtatcattatatttataacagaggtccttttaaggggaccatacacacattgtagcaaaggtcaatagataaggttaattcacagtgtgataagttaatctgtctactaattatttgggaatcaatcacaattgtttgtagtcttggcagaggaaggatgaaatcgaccagtgatattccagttctgtgcacaagcagagataattaacccaacatggatattgatttatacaggtagatgtataaaagtgatcagaagctcctctataatgaagtaaattacaggcaaaatgtgggtatatgtggtggttgattgtttgacctgcagtcaccaccctagctaaaataacttatcgtgtggtttcataacaaccaagccacatgattcctagtttatttatcatggagataaatgttacacatttgtttaccagcatacaagacctggacacgtgcaattggggatcgtagtacatatctagccagatctttctgctcatttagtttcatggctagattttactatgagttgctttatgaatcaaaccagaaattctgtactgaagtatttgtgaatgtgtatatttgtcatgtagtaaaaaacacgaatattagggaacgacctaatatgaaataattagaaggggtgagacttcgaacccagatcatttagcccgctatcttgtggagctagccggaagacgacccatgggtgtttgtcgtatttgtcatgtagtagtgtttatattctccattattttttaaaatttttttaacattagttaatcataatttgcatttttttttaattatgacgcattcagctagtatatattcaaccaaagttacaacatttccatttttgtccgattaacgagggaaccacttatgtgctagtagtatatatataatataatacacgcatgcatggtaccagaccagctcataattttcaggtactttggtatgtcattcgtgtttgactcggtttttaaattcactcgtttttaaaaatacatatatgtgtttgagtcggtttttaaattcaaatgcttttggaaatacagaagaagagtcgtataagaaatctctttaaaaaaactcgcatgctaacttgagacgatcagactcctaattgccgctcatgattctgtaaaactaaacaaatccaagcgaattctcacggtgaattttaccttaactaaaccatataataataatcaaaagaaacctcacgcgttgcaatgcacgggcattttttctagtctgattaaatatttaaattgccacatgaatgcatcaagagcatgaacttggtataaacagaaactaaatccgaagttccgaaccaaaccaaatttggcctattatttttagaacctcacttatgaaatatttcccttgcaattatgtacgcgttcctaaaatccttgcgttccaaattaaggaaatcgctgtgtacacaaaaattaaatccaaaattagttgcttaattattacaggtgatcaaaagtactcccttcatctcaaattacttgttctagatttgtccttaattggtcaatgatattaatctttgaatatgaatttatataattaaacttatatagtttgacacatcacaagatttatatatttagatttatcatgagaaatcctatcataatgttgccaaaccatgcagattttcaaaaattaatagtcaaagttagctagctagacacatttgatttataataactaatccgaaacgactagtaattaagaccacgtttgattcagtttaggattatgataatctgaattattaggagtaagctgaaacaaacagatagcttattatgattgattattataatctataagccggattattataatatgataatccactctaaaggtgctttttctaaattattgggtgaataacagctaataatccagagaatcaaaaggctaacagcttattctatgtcagtttattataatccagcttatagtaatctgatttaataatctatattataataatcttaagctgaaataaacaggcctaagttgaaacggagagagtacgtagcaaaatcaatcagagctgggtgcatatgcaacgaattaaatcggagatcgaacggtcgatcgaaactaaagcagtgtactgcatgcaacggcttgcaatgtgtgtaccagtctaaccacttaggtacttaaaccaaccaaaaaagtgtaagcaacccaacgaatccttgcatggttcgtcaaccgtacgtacatcaactccaaatcgggtccccgtaactatacggcattatggcggcgctatatatttcttctatctatctactctctccttctccagatattttgacgccgttgattttttaaaacatatttaaccgtttatcttatttaaaaattttaattaattaataattcttttcatatcatttgattcattgttaaatatgctactaccacttaagtttttaaataagacgaacggtcaaacatgtttaaaaaagtcaacggcgttaaatatttagggataaagggactaattaactatagattatatatataataagatttacttcggttcaacaaaaaaatatctcgagatatcggtaccaaatcattttctaattgttgaatctaacaatgcacatcctgaccagctcgatccaacgatcgaaaacaatttggtaacgtcaggtaccggtatatcgagatacttttcgttggaccggaaaaaatctcatatataatagccatagttagccacacaatgatgggttgcagctgacacacactgccagtactacgtggttatactgctaatgcgtcattagctcagttaattagccattgagaggcgagctcgatcgaggtgaggaggttagctcagctgtcgctgtgaacacggagctctctctctctctctctctctcctctctcctcttcacccgctgccgcccactactactaaaacgggcaactcatccacctcctcgacgcagcctcactcctcctccattgctacctcaagctccagctcgagctcgaggctttgctttggccgcaatgccggagctggaggtgtgtagccctgcgtcgtcgggtggggcgtcgccgccggagtcgccggtggaggggaggaggggaggaggaggaggggagaagagggggagatcaggggatggcgggaggcacccgtcgtaccgcggcgtgcggatgcgggcgtgggggaagtgggtgtcggagatcagggagccccggaagaagtcgcgcatctggctcggcacgttcccgacgccggagatggccgcgcgcgcccacgacgccgccgcactcgtcgtcaagggccccgccgccgtcctcaacttcccggacatggccgcctcgctcccgcgcccggcctccgcctccccgcgcgacgtccaggccgccgccgcccgcgccgccgccatggagcccccccagccgccgccgtcgtcgctcaccgtgcaggccgactccgccgccgccgcattcctgacgcccaagaacggcggtgtcagcggcgccggcgcggcggacgacgagctcgaggcgatcgtcgagctgccgcggctcgacgagctggacgccgccgagctcgtgttcggcgccgcgttccaggacacggcggcggaacacccgtggtgcgaccccgtctggatcgacggcggctacgcggcggccgccgcggcggcggcggcggccgcggcgcacgacgacctgttcggcctcgacgccgaccaccatggatgggcccagtcggttggtgccctcttatggaacctgtgattcgatcataataataattaatctctaattaattaccaagtaattaacagctctagcttctttaattttaatctctccttttttttccagcttcctaaatctgtacataggtttccagttttttttcttctttttttaatcttttttcaggcaggcttaatatatatttctgcttgattttttcccctttcgtttcaagtgtcctgtagctttgcctttttgttcagtttggggctcttgtcttctgaatttgtcttccctcttgcctagtggctctacctgcagagtgtcaactaagctaagtcattaatgacttaattatgtataataaaaatctttacatgcaagcactacattgttaatttggccatcaatggtccataattgaatcctcctcctcctcaaccattactatattatcattatatactccatccgtttcgaaatgtttgacaccgttgactttttagcacatgttttaccgttcgtcttatttaaaaacttttatgagatacgtaaaattatatgtctacataaaaatatatttaataatgaatcaaatgataggaaaagaattaataattacttaattttttaataagacgaacggtcaaacatatgataaaaagtcaacggcgtgaaacatagggagtatatgtacaactcctagctagcagctaggttcctgcatgcatatatattcagtgcagggggcaattgattaagcaacaacttcaaatgacggctttaatttagtaccattgctatcaattgggtaattaactagctagtgttctttgatcactcatcctaattataaagtgtaaggaaaaagtagccgaagcactactgactagtagtactgaggcagccatttttgtgcgtgtggtgaaaattgaacttaacttaatttgatcaaaatgtaactttctttcactgctttagtaattatttggtcagcaactagtccaacgggccatcttttggcttattcaaggaataagtaaaatggtatatttgtaaacgaaaaataatttatgaataaaacttttatatacgcgttcttggtgatataaaagtaaaggttgaaaaataaaactacaattaaaaaaaccctagaatcaactctaaatttaaaattaaaaatttaaatattggcttataagtataagcgaaaaaatgagattgcaagtacgctgccgtagctagctacacactttccgtcctaaaaataattaatttttaaggatgaatttggccgtacctccggaagttgatattttagggatagatgggtataggtttaattgtgtgcttaattgattaattaatcctatatatatatatatatatatatatatatatatatatatatatatatatatattgattattatttgagagagggacacacacttcagtacatctctctcacggacacgcaaaagcaattaagctagctagagagttgtctgttgtattttttggatggtgtgaaattaagaaagcaacaagatatatggctcaatccatgtaatgcaccccaaaaatatcgccatgcatctatcgtccaaatatttggttgtactatacctttttttttttttggttccatccttttgttcgtttcttgtcatttttcttggacagccactgattggaagagagccatttccagtctattatatagctaggttgtggttgggagagatgccagctccatctgagtaatgactggtcagaggttttctccaagtgaacagtgcttcttggtgtgcatgtcaatatgcatgtgtgtggttttttcagaatattcagagttttgtccaggtccaagtacgtcatgctgctgctaggtagtaaggcttgtctgcactgttctggagtgagctcgattaattggtcgcaaatgtaatccttcagacaatgcgcagagagtttcacaggaccaccacatgggagagaaaaacaaaaagacagatatattactccgcttaaaaaaaacttaatttctgattgtgtaactggacaagtatttaaaaaagttaatgttttcttaaacaacttaggaggagtttttattagctttttgactcagctacctttctcatctatcataaacacgtttttcaaaccattaaatgatgtgtatcgtaaaaactttatatatattcttttaaaaaataaatctatttttattttataatagttagtacttaattaattatatactaatacctaatctcattttatatgccgctaaaaatctcgacctatatatccagctatatatccccacattcggacaaagccaaattgagaggagggagtactagatttgtgtgatgcatgggcatacgcaacacacggacgtgcgcattcagggattgatttgtacttgtgaagggaaacaacacaatgaacgggtaaagaaaaggcgagtcatcatacagggtgtagggatatgcaacaagttgtgaaagcaagagagatgtgtgtcaggtgatcaggaccagatcaatgtagtacacagggtgtgggtactcctgcatcttgcaaaggacaggattgactgcaacagtgcaagtcttcctggtaaaatctgatttgggaatgaaacactggaacatgccgagctagtgtacgtactacggattacggatcaaactgtcgtgtactgtagtactccctccctactataaaatatatgtaaagcttttcactatttatatgtccaacgtttgatcgtttattttatttgaaatttttttatgattagtatttttattgttactagatgataaaacatgaatattactttgtgtgactaattttttaaactttttattgtaaatttttcaaataagatacccacggttgtacttattttagaacgaaagtagtactttgttatactactgcatactgtgtcactgaaacgaactgagtaacacagcaacttagttcgaagttaattagttttttcctataatattgtggtaatgcctcttttcagtgtcaaaaccaggacgggttttgacaataccaaatttattgaaatacaatttgtattagtatgagcaaaaattggtagcaaactaaatacaactgagcttgtcatactactgaaatggccaaaaaattggtacgataaaattttggtttcaatctaaataaccctaatatgtgacacgaaatttgcctttataaggcgtcgtcaaaatttaaatattcaaccttaattttagagttaattttaaattttctttcagcatgattccgtttttaatattgatttttttaagacgttaagtacatacatataaagttttatctataaattatatttaatttattaataagccgacataaagaccgaaacaagattttttttcccttctagatgatcgatcgccagcccaaggtaaagaagcagtgtttacgggacaaaggtgaattggagaagcgtcgccatcgagcgatccatctttgctgggcgatcgagaaataatgaagctctcgcagggggaggggggggggggggggggcactgttcgctgggaatcaaaatcaacgcacagcacagagtaagtctagctagatccatcctttcctttgcaattttaatttgcaagcatgcatgcattgctctgatcgatcgagtgtctctggacgtcaaactcagctgcagtgaaacgagtgtgcaacactactgctgcacacatgtgtatactgtatggtaagcgatcgatcgagtagtcgtcgtcgtcgttgctctctgcagctgcagatgcatatgggagatgtatacagtagtaagaggagctagctagccctgcattggcatggccagccaccgccctgtctggctgtctctggccggcggttagcgatgcaccccattattctctaattaattgagatatactgtatattctacctcagtttttatcggcatatttttaaattattaaatggtacatttcttatgaaaactttatatacagagaagtttctctaaaatgtcagatacatttgttttttaagttcatcttcatcttcatctaaaacttcatcttcatattaaagtatgaacaaacaccactttagtaagtcccggaataagttgatttttatgctatctttagaaaaaataggagggaaatgtgtttgtacactattggagaaaccatctttggtcagttgaccaaattccataataatctcgattgcaaaaaaatcagaactaatatattctttagtcccggtttaaaaggttagagctattttttttatctttagttccggttggtgttatcaatcaggactaaagatcatttttagtcctggactaaaaatttagatgccctgagtaacttgcttttaggccgagtttagttccaaactttttcttcgaacttccaactttttcatcacatcaaaactttcttacacacaaacttccaatttttctatcacatcattttaattttaaccaaacttttaattttagtatgaactaaacacacccttagatatggagggagcacgtagaccggccggtccgactgttgtcgattattacgtcttgtcacattaacatctcgaacaatcttctgacaaagccaattaatgcacaccgttattagctggttttgcaatttgtacttattgacctggcatgcatgaacatcgatctcttcttgcgtactatagagtagtaggtatgctccgttccgattaatcattatggattatgggtgtgtttagttcatgttaaaattgaaagtttcgttgaaattaaaacgatatgacgaaaaagttgaaagtttgtgtgtaggaaaagttttgatgtgatggaaaagttagaagtctgaagaaaaagttgggaactaaaccatgcctatattacatatgggtgaaaaaaagaattaaaaaactactccttgtgtcccggaatataaatatttttagatttagatacggttattaagaaagtaggtagaaatgaatggtggaaggatatgattggttgtgtagtggaggtaggtggaaaaaatgaatggtggagagttgtgattggttagaaagaaaatattagtggggaagttgtaataaacatctggtactatatttacttcggtaataaactcgatatatctaggatcctcactattttctacttcctccgttttacaatataagtcattctagcatttttcatattcataataatattaatgaatctagatagatatatatgtctagattcattaacatcaatatgaatgtggaaaatgctagaatgacttacattgtgaaacggagggagtagccaataacaaatcacgacattatatgttgattatatatatggatgcatgtatcaatattcatttactctcatgcataaataacgaatagccttagaaaataaatacaaatatgattgtcatttgagaataacctcaagatatatgtatgataattaattggaaatggatgaagtagtgtataatataataattttacacctacagttatatagacaaaatctctattatgatacgaagataatagcaacatatagcaagttttacagtattagagatgatagtcgtttataattttattcatatcatctactcctttgttcgctaatgatcgtatgatttataagtactctttctaaaatatgatcagtgcacttgtcccaacaccccgtaatagttttaatttatttgtttgattataatctattcatctatttctttcatctcttttaaattttctgtagatatctcattcgtttatctcctctattttcttcccacctcataaatgtaagcatacatatcatcaagagactagatacgtgcctacttcctccgtctaaaaaaaccaacctagaagaattgtttctttttttggacggagggagtagatgttattgcaattgcatctgctgatgtcatggacacgtcactactgatactcctaccccaaacaggcaacagtaacagatgaggctgctagctagaactgctcggaattattttcaagagaaaacttagaatcgggtgcccgatggtttggggaaaaaattgggcgttgatgtcagcatgacgtatgcgtgaaaaaacactttaaactatttttttctcttaacttatttatccaaatcatgatccgattccactattaaattcgttgcaattaaatcttcaaaacaaaaccacacatggatatattccaacgaaaaattcttttagcttattattgaattatttttaaggcaaaattggttatatagcattgatagttcacgttttttgttttatagcacccaaagttcaccatgttcaccatgttcctatttttaacgcttatgtcaattttcgatcgttttctgtctgtcttgatctagccacacacacgatatgacgtttctacccctcacaagtacaagtagaatgcatgtcaatgaggggtagaaacatcatattgtgtgcgtggctgggtcaatagcgatcaagacggatgaaaatattgacggatgtgttaaaaatgggaacggggtgaactttgggtgctattaaagtgaaccggtatctttcgatgctataaaaccaaaaacgtgaactttcaattctatataaccaattttgcctatttttaaatattgcacgatgttctactaggtatatcggaattgtttcactaagtagatcaaaaatgtttcaatcgtttaattcgggcgttgtttcacattatataaaatcaatgtttcagcaaattcagttcactgtaacatttgatacatatatactgaaacattgaaacatttttggtgaaacaaaaaatggaacgaattcccttaatagagggtttccaaaatatgtaggtgatttattgcaaaagaatatttcaattcactgcaacattagatctatacatagtgaaacattgtgagtacactaggtgaaatatttttggtggaacaaaaaatgaaacgaattcccttaatagagggtttctaaaatatgtgggtgatttgttgctaaagaatgtttcaattcactgcaacattatatctatacatagtgaaacattgtgactacactagatgaaacattttttgtatagacacatggcaagtgggggcagaggaccgtggtggggcccaagcatcacgtgtcacgcgcgtggggcggggggagcgcccgatttttgctcccccccgccggtcgaccgatcgctcgcattcttcttattttcctggccggccggacgggtgcattacaattatattattctctcgtgtttaaaagggaaaagggaatgaaaaggaccattgctccacaaccattcgatcgatctggagttaccgctgcaggacacaaaaagcacaatgaatcgccacagcggacaaatcactttcgtcactattgctactgctcgacacttttttcacgcagtgaatttcacaaaatcaaatatttaatggtctaagcttcacaaaaattagctattttaactgatgacatatatataactgtaccgtcccccagctattgtggttctagaattttgcaaaaccacaccctataacatagtgtttatgatttttttttattaaattcttgactaaggttgatatatagttcaactctttgctgttttcaaaagtattgtttcagatatgttgaaattaattgagatttgtatgaaggtaaggctttataacacatttaaatacaaaacctgtggtaataaaacataatgttttctacttctttcaaattatagtcattttcttctccaacactactacataggatggccatgcatcctacttaagtccttcatgacactactaaaagaacctaatgaacctaatataatgggtgccggttatgaatcacacataggtattggtttcctaatcgacaccctaatagcgattctcatatgtgatattgacaccaattttagattaagaaccggcacccatagtgttccacaagccaagaaaaaacaaacaaaaaagccaacttgagccaatactcagagcacccccaaccctgtccctaatctacccaactacaaagtttaattcacagataacacatgagcacaacaaagtttacttcaacactgatcccatattaacaaatcaacaaataaaaccaaataatagcctctagatgttcatattaacatatgaacaacacattccacatgaacataacaacaatcaataatcccctaagttgtacacgcatctggagcctccattgttagatccgtcggcctggtaccatggagaatgcgagggagatgaggaggccaatgatggtccatgacagactcttgataaaggcacgcgagctcgaggtaacatgcatcgtcttcgtagctgctactgctcgttctcgtcactatcaagttcgcggcggctgtatctggttgcccccgacctaattgctgctagatccgccggtggtcaccgacggacttgctggcgttgctcatgctcatggtcgcgaggatgcgcgatggaagagaggggaaggggcagcgaaggtgaggagatagcagaagagattgtagctactagaagctatctaaattgggtgttagcctctcaccgtctctcttactggccgtaaccaaataaatttaaattttaaaatttaattttagagttgattttgataatttttatgatagtctattttctatttctttgaaatcacaaataatacatacccatcaaaaccttagacaaaattcattctccaaaggaaaaagaaaagacagagaagacgacgttttctccatccaagtatgagttgcatgcatcacgacgtactcgcgatctttccctttcatccaagtgcaaatacaaataattttattactacgtattaatttatcctactgttcccgatgcggctgtagcttttatggttcgacggttaattttttacttgtattacaaaagttcctttttcgtagtacacaagggaaccattgtaattaacttccatattaaatgaatgaacaagttgcctaacttttgcaaattggcatatactcctatatgcaccgcactttgcaaaagtgctccatggatgttgatttaccacacgcgtaattaattaagttaattggtcattaatgtaagtgtcactccttacttttgctactccgtacatagtttaagtaaatgtgtgtcttgctgatgaggagggccggaggtcaagtggaacaggaggtcaatcaaatgatcattcggtcgcaatgcagtgtacctgattaaactaatggaggggcaataattccaggggcactgtgcggcaacaccgtctgcttttcttgtggattcatttaggagctgtttggtttacatggacttatttcaagtccatgtcacatcggatgtttggacactaatttagagtattaaacatatattaattataaaacccattccataagtttggactaattcgcgagacgaatcttttgagtctaattacgccatgattttgacaatatgatgctacagtaaacttttgataattatggattaactatgctttaaaaaaatcgtctcgcggattagctctcatttataaaattagtttttttattagtctatatttaatactctaaattagcgtccaaacatccgatgtgacatgggctaaaaagtattagccccatctaaacacccccttaattatagcatgtcgtacaagttgggtgataaacaaaacgatggatcccttggttcactgccactcctgctcgaacgttcaccggattaatgtgcacgcacttgttctcctgtgtgacgagtagaaaatgtagtacgtagtactatactgctcgaagtaacgacgaatagtacaggcagtcgggacttggacagttggcatttgaatgcactactacatgtttttttttttcatatgacaaaaatcgatattcgggggattggacgacccgcatgtatactggtgtctgcgtaaaaacatattttcctgtggtgcccagcgcagccgaatggaaaaatattttcgaccaaaaaaaaaattcaaaacaaaaaatgggccaaaaccctagcccgctgctggcccccagctccccgaggcgctgtcgtcgtcctcaccatagtgcactgccaccatcgtcacatttgtagctgtcaacgagggctgaggacggtggatctgtatctcccgagggcgggatccctcttgcccaagcccaccgccgttgctctcgtgccaacctcgcctgccgccaccgtcgccggagcttgccaccaccggagcccgagcccgctgcctttgccgccggagtccgtcgtcacgaggagaggggataggagtgggtgtgaggagtgggggaaactgaaggagtgggatggacgggaggggacttagtgggagagagagaggagaggataataaaaagagttggaagagagagggtatttttacatgcgcgccatcatatcaacccaattcaattgaaacgaaactcttcaaaattcaattgaaatcatatcaacccatatcttggcacgttcaagatgggcgatggtaccgaggccataaatttttcatcagttattctcttcttcgtctacgatcctactaaaacatgtttattctcttaattagcgcgctccaataatagtttgatgataatcatggccaccttaaagaatatgtatctaatgaagtgatcgcattttgaagaaaccaaatattctacttatccactttaatttgtaaagaaaaactaactagtatgtatacgtagttgcattttcgacacaactatatctccctagacgtacgtagttagagcatatccaccaacattgtcgactggtgagcatcctctcagccgctgttgatcatgtgcaattctttactcatttagtaccaatgcgtagctagataaattaatgagcgtgttaaattgatatctaattctcctgttgtgtatagagagctgctggccgtgatatgaataaaacaaggagactcctcccaacagattgcagagaatacctaatgttcaacaagcatgagacggatctggcatggagaaagaggagctcgagtctccacctttggtgtggggactacgagagccctctagccccgccccctaaatttctctatcatacattcggaagggttagagatctatctagtttgttcagctctctactatttttttgggatatgttcctttaaaaagtaaacatagttatgtagctttgtttaaacaaggcttcattttgtatttaattacaccgaatgatcaaatcttagatatggccctgaattatactattaaatatcttgttatcatcgcctataaattcagtaaagtctaaagcttcctttcatataaatcaaccttaattatcatgtctgtcactaacacacacccccacccatcctcttcataggtactcactccgtcccaaaataagcgtagttttacactattcatattcagcgtttgaccgttcgttttattagatttttttatgattagtatttttgttgttagtagatgataaaacatgagaagtactttatgctgactaattgtttttaattttttcataaaatttttaaataagatggacgattaaacgttgtacacggatacctatggttatactctctccgtttcaaaatgttcgacactgttgactttttagcacatgtttgaccattcatcttattcaaaaaattttgtgaaatatataaaactatatgtgtacatgaaagtatatttaacgatgaatcaaatgatatgaaaagaataaataattacttaaattttttgaataagacgaatggtcaaacatgtactaaaaagtcaacggtgtcaaacattttgaaatggagggagtacttattttgggacaggtgtagtagtggccattcgcatgacagatgacatgcacatatataatcaatccacagagattcatagtacatctgcccaagtacccagcaaatcaattaattaaactaatccactatcgtacctgttccacgtaagaaagtctcgatgaacagataaccttctacaagttcagcattgatatccatcgatccaaacagtgcatcgcattcgaagtttccaaccacagcattaatttatcatccaagattactaatgcgtagtagggttaacttgacccagcactgttggagaaaccatctttatttggtccggcaaaatccacaatagttccggatccaaaaagaaccgggactaaagattgtttttagtcctggttataaatattttgatctttagtcccggttggttcatcccctgtcaaatgtatgtcagggggccgaggatctttagtcgcggttggtgtcaataaccgggactaaagatcaccactttagtcccggttggtagtaaaattaaacacgtagtatataatctctatcccttatcctctcctccacagttacaacttaacggatcgaatctcaccccctctcctcatatctatcctctctaactctcttctccatctcctccccttcctcctctcctcccccttctctccccttcctcctccccttcccggccggcctccccttcccatccggcgggccggccggcggcgggcggcggggcggcgcccagcggggttgcacccggcggagggcggcgggcggcggggccgcgcccgtcgttcgtggcgaccggcggcggcattctctttttttttttaatttgtaatgattcactgagatgtatttatccgagaagttacaaatttgtgattcattgtttggatttgtgatgtatttgagtaatttcttaggatattgtgatgtatttgatttgtgtgtataagtaactttatgatttgtgatgtggatttggtgatgtgaatttgggatgttagttagatttggggatttgcctacttgattcgggagaaaataaaaaggaaaaaagaaaaagaaaaagggaccatctgcactgccgctattttctctttaagatcccctcatcacatctttagtcccggatccttactcccggttaaaaaaccaggattaaaggggattcctaactgggagtgatgatttctccaccatctgcattgtacgtgtgtacgattgtaccaaaagcacgagctcacaatgttgtgtaactgtgtgcaagagctggctaaacgtacgtgcatatgctctcggtgattgatcgatcgatcggctgtttaattggttggtttggtttaatcatggcgcctctgctgctgtttgcacgaggtgacagcttgatcagattgtacgacgttattacgttcaccactatataaaccttattaagcgctagttaattaaaagccccacaaaagatactgaatttttatccctaccatgaaagagaagctattggtatcggttcagaaaccggcatataaggttgtacgagtaaaaaaaaaaacgttggctttgatgcacgaatcgagatgatgcttcaaacggcttctcattaaatcctcatcctcaaaccaatcatcataatacacgaacaaatcattttatatacaaaattataaatggatcaagatttacatatacataattgacgttagaataaaacgcagggtgtggctaatgggcaggtgactgctccgggcgatcacccccatcacccctatacgctactctctcccttcctcctcactttcttctcttcctactgtaccatatttttttaaaaaaataaaaaaataaagttggaaaaaattatgtatagaaaatactatttataaaaaaatatttgaattcaaattcaaatttgaaacgggtatgtaaacttttgacttataaactttgggtctataaactaatatttgaattcaaattcaaatttgaatcggatatgtaaacttttgaattttaaactttggatttataaactttaggtgtataaactttagatgtatagaaatactatatataaaaaatatttgaattcaagttcaaacttgaatcggatataatttaaattcaaatttgaatcgggtatataaacttttgacttataaactttggctctataaactttaggtgtataaactttagatgtatagaaatactatatataaaaaaaatatttgaattcaaattcaaatttgaataggatatataaacttttgacttataaactttgggtctctaaattctaggtgtataaactttagatgtgtaaactagaggtgtataaactttaggtgcataaatttactaaaatatgaaagtaatgtggtgtcaaaaaggaaaccacgtggaggagaagggatcgcgccctgatcgccccgggcgatcgctcgcccagtaggactttcctaaaaaacatgccaatccacaaagtaaaaaacacataagatccatactcatataatcaacttaggccccgtttagtccccagacaaaaattttacaccctgtcacatcgaacgtttgaacacctgcataaagtattaaatataggctaaaaaaataactaattgcacagattgcgactaatttacgagacaaatcttttaagcctaattgctctataatttgataatgtggtgctacaataaacatttggtaataacagattaattaggcttaataaattcgtctcgctgtttactgacggattctgtaattagttttctattagtgtccgaacaccacgtacgacaccctatataatatccgatgtgacacgctaaaactttataaccctgtatcaaaacaccccttactactcatcaaggctagagtagtctagacacctacaaactaccgtcgagcaggcctgctgcacatggatctagccgtacccgacatctgagaggatagatttgactgcccctgacctcttggtgtttggatcgggccacctacgtaccgagatatgcattgagaaagtcattggtgtcaccattaccactgaacacctgggtcacacgctagctacaaatgcatggggaaatcgatgaagccattggtgtcgtcgacttgtcgcagctcgatttcaccacgtacgagcctgtgctcctcaagcttgtgaaacaaagtatccaaatgccacgagcttgagggccatcacatttggcggcccccgagttcaaggtgaccggatccagtcagcccccacattcttgacgtgctgatgcagatggtggtgagagagatggcacgcgggtaggaatgaaaattgctcgaaaacagatatggtacgtactataccacgctaatgtcatcatgacgtcagcatggtaccaatggctgtcgtgtatagtatcacggtatcagatctggtatctagctatcagatctgaacatacagtaccatactgatgtcaacacacataagctattccgtaggaagggtatagccactacaacagagcaccctataggtgtatgtaccattttactaaccgataccaatttaggagtacctctacccattggtataggtgccagttttaaaaccaacaccaatagagattataggtgcttgttctgaatatataaccgatatctttggttttctaggagaaaaaaaaaggaaaacctaactcttgactagctcaaatcgagccaattcatcaagccctagatcccagaatgaagctccaaatcccgtaaaatgaagatgaacacatgaacaacaatcaataatccctatattcttatttcaacaaacaaacaacacatctagatcttcaaaatcaacacaaagacatgaataaacgtgaacaaacacatccagctgctatcgccttcaccgacgacacctaaaccatcgccatggaggtcggaggtggccaaatccgacgacccccgacttccaggcagccagtccggcagccccctacctccatgccagcaaatccgctggccaggccaccaagaaaaagtagagaggagaggagaggagaggaaggagcggtagtcactgtgtcctccgttgttgtcatcgcccctccaatgggtggaaatatagaggggcttctgacaaaggagatggagacagagtgagagattgagaggggtgagggagaaagaggagagaggtcagccacctcctcctcccacttcaccacctcccaggtaactgtccctccttccgcgtggcggcgggagcgcgaggcgcggtggaggtgtcagcgataggggtgttgtggtgtacatcttgatccgatggtcacctttggccacaaagccgtctgtcttgggggcagaggaggagaagtagccattggcggtgggggaggaggaggggaggtagtagtcgttggagtacgagaaggcaaaagatggtggaagggggtggcttcggagagcaggagaaggggagagaggtgttggtgtggataaggatgggtgggtggataagaacggctcggctcggctcggtcggtttttttaaaacatgtggtatatgtttttaattaatcgatacctatacatgtcggttcttttaaaaaatcgggtacctatagtgaatttttttatataatttagacctttttaaaatatgattttattaacaaaccacctaggaaaatattttcaaaaatgaaccttttggccaatagcagtggtgtggccaaactgtgagctgcaacaccaatgttcgtggtgttgcaaaagctaccccgtggtagttgttgccattgaaaatgtcaactgagcgcggactcaaatgggtttcaaattgggggcaagaacattggattttgagtggatttggaaggaattgaggagggggcgtcagttgaaactcgcggacgagagagagaaaaaagagagggctggaagaggagaagagatgaaggaggaagaaagaggcaacggtggctggggatatttggcatggcagcgtcacgccactgagcctggcgtggcaagaccactccctcctcccccgcgccacgttggcgcccggttgacgttttcaatggcaacaactgccactgagcagcttttgccatgtggtagttcagtttgaccacgccaccactgtcaataaaattatatatttgaaaggtctaaattataagaaaatttcacctatagtactagtgcttgctttttctagagccggtacctacagtgataaaagatgctagttctacattttttttaaggacagagatgggaaaagatccaaaccgatatttatgaggagttttgtagtagtgagcgttcagtagtactccctccatccacaaaagttacgtctattttacatttgagtttttctaaataagttgtttctatttgtagtctttatgcattcaaagacttaaatgaagatataaattaaatattttattagaactaaggagacatctaaatactcattggttgtatgcttgcattcattttttgttttttaacatccaaggtgatttaatttctccttagtcttagtgtcaaaagtaatactccctctgtactcgtcaaggaagttatttaagatagcgacaaggtctccaaaacacaactttgatttcttatttctataaaaatatttattgaaaagtgatatatgtatacttttatgaaagtatttttcaagaaaaatctattcatataatttttacatattcaaactcaacaaattaaaagttattcatgatttatattcttaaagtttgacttaaacattgtcctaaacaacttactttacgagtacggagggataacttttatggatggagagagtagtcctctttttgttaggctcaaataattctgtgcttacgtggaggccatgcaaacggacggacggacaacaagtgggtacattattgcaaatcatatccgtcaagatacattgctgtcccggcccctgaacaagtacgtgaggcatgcagcaatggcatggaaaaagaaacatcctactatgaaataatccacgcgttactaatctgggatcgttaattggacattttcacaatcgaaattaaatcgtcgtgatctgatgtggtccagtgacgctcagattttgctgttgggttggacacacaaaagggcaccgcgtgtgaatacgcgtgtcagccgctagctcttgtcattgcatgttgtcgacaagaggacctaccagagctatctctcaagaaccatatatttccatgtgtgtacaaaatatactttatttatcatatatgtgcgcgcataccatattgagaaattgtaaatccaggatgagcattaaactatactcatcggtactcgaccgatataagataaaatatataatacgaatcatatatgtaatagaaacaactgttgaataaaaaaaaaatagatatctaagattcttccgtgtcaccataaataaaaaatttactccctgtaacttttttactcgttatgtgtaaacataccagtaaaatttttacttatgataacgtggacaaatctcaaacgttcaatttttaaaccaacgataagttttcaagttctatctgcatatctagttttcaccttgtatttttctacaatatcaagtgtaaattaattcgatcgagagctagtaccctatgattaatcgaaatctagcgaacatatatatgtccttgtatatataatctagcgaacatatttatttttttcctttcccttttctttttcctcctattcttttactatcttcttcctccactagagccatctcgagctcccctgcgtcgaagaggccgaagaagagataaatgaaagaggaagaacggagaaaaaataataataataataataataatgtgccatgtcgtcgtctacatgttataccacataggcaagaccacggtcaaatgagactttggaccgggatgatacaataaaccaagtttagaaatatcgatacacactttgcaggtacgtggacctagatgaaatctgcttacaagtttaaggaccgccagtgcaatttaattgctctataattaattcaagtttgcaacaacatcaacctaaaaatacaattgtctcttggaagaagtagatatattttaagaagcatgagtacacaacggattcgttgaaaacctggacaatgtgcatgtggccagaagacttgatgaagccattgtagcagaccgggatagcttgttttgcagcagattctgtaggaccgaatcacaataactaagccaaccagagaggggtgaatggttgatataccaaaaaaccgaaaacttttagcggaaatgaaagttaccctcgaaatcgacagaagtcggtctgaccgagattgatatgccggtctgaccgtgtggatgccgccggtctgaccggtatagatcaaccggtctgaccgccgaagccgcctgccacgcctaccgccgctgccggtctgaccgcctcgctcccgccggtctgaccgccgccttgccgtcggtctgaccgccggtgagtcgtcggttagaccgccgaaacccgatgaaacacaaatcgaagaactcttaaagtagatgacgactttattgattctctctgtatttacaaagtgcaccaacagcactccttacaaaaatttcgactaaactcgaaaccctaactcaaaaatcaactcaattgctctcaaaagcgataccgggaagcctcacactccccctctatttatacccgaggtaggcagcctaaagccacgaaccaaactcatactaagagtcctaaacaccttaggaaacccctttgccaataaattccaaataacaaaaccaataatctccgatgccaattgttcatcacagaataataatcaaaaacacctttgattttacaatctccctcttgatgaacacattggcaaacccatcaaaaatgttttggtgtttgaaaaaataaaaacaaaagcgataaaaagcacacttcgtacaaacgtacacatcgtgctcgaaaatcgaaaagaaaacttctctcacttttgaaaagaaagaaactcccaattgaaccaaaaacaacatgctcttctcaactcatttgcttctccaaaaattcaccttgcttctcccaaaactcatatcttctcccccttttgacaatgatttcattaagcataggaattatgttcattaatgttcaagagcttagcatacatatagcatatcatgtcatgtgttgcaataaagagaagatgaacccatctataacataacaagcatgtattaaagtataaccatgaaccaaagattttacaattaagcttgaatcaacaatcaaaattcatgatttcatacgatttataatgcaacatcttaacaagcacataggttgaagaataaacactaaacacatatacctattgcatttatcactctttctcaaataaactttagcacaaaataaccaagagaatttttttcaactttttcttttcttgagcctttttgctcatatttttctcttttattccgggtacgtccctgtcgttaagactgtttctagagattcggcacccattattttgctcacatcgaatacgtccttgtcgtcaagactgtttccaaggattcggtatttatttttttaatatttttattctcttttcacaatgagcaattaaagctatttgaggaataaaaattcaataaagcatatatatagagcatttatagatcaaaccatatgctagcatcaacattgcatattttcttaattcaagtataatttaagtgtcatgcatcatctcccttgaaagcaaaatctaaatctcatgaaaagactagaatacatacaagctatgctagagacaaataaaccttcaaagtattgctagcatgcacaagaaaataccatatgtatagaacaaagctctcttttatcaatttttctcattgtcatattttttgcttgataaaaccatgaggtacaaactccccctcaaaccatgccaaaaggatgaattatgcccaattcaccacgaagaaaagcaaagcgattagaatccaaaggtttagcgaaaatatcagcgagttgcgactttgtgtccaaaaactgtaattcaacatctcctttctcaacatgatctctcaaaaagtgaaaacgaatatcaatgtgctttgtgcgtgagtgttgaacaggattcttagcaatgttaatagcactagtattatcataaaagagaggtactttctcaaaagtaagaccataatctttcaaagtagataaaagccaaagaatctgtgaacaacaactagcagcagcaacatattcagattcagcagttgattaagcaacactagattgtttcctagaagaccatgcaatcaatgatgtaccaagaaaatgacatgttccactagtacttttcctatcaattctacaaccaccaaagttagcattaaacactcttccatatcgagaaatattcaacacagaatcaccacaagaatcaaaaactttacttccagttttcttaaagtgaacctcaaaatcctcatcaacaatttgtgaaacctaaagcaaattgtactttaaatcctcaaccaaagctacgttcttcaattcaaatttttcatttaccttaaccaaacctgtagcgagaacgacacttgtagaagcgtcaccaaatataatcgattcagtcttggatgcctttttgagagagaagaaccaatttttatcaccagtcatgtgccgcgaataaccagaatccacgatccacacgttctccttccgcggcaccaaagcctacatagaagcagaagtcgaagcctcagtactggggttagatgataataaaaatttagcaatctagtactgagacacacgaccataagatccaataggcatatatccacgtgcaaaaacagtttgagaattttcagaaaaattcctccgaggccggtctgatcgagggtgtgcagccggactgaccggaggccggtctgaccgcttctttaccgccggtctaaccggtgcccggtctgaccgacgctcagtagacggtctgactggtcgccggtctgaccgcgggacccactgcggtctgaccggtttcctcgagggaaaaccagattttttgccactttgattttgcaagagcaatctctctctcctttttctgtttatgagttaatctgaaataaaaaccaacaatatgtccatcttttccacaaaaagaacaagtatatttttcacgatgattagacacattggtagaattagaagacttagcaacacaagcaacaacaggaggttttgcatgcacaacattggattttgaagaagatgcattcaaggtagacatgataccagcagatttaaacacaattttggttagaatcaggtttaaccaaaatctcaccacttcaagcaccaacacctaacacaacaggaggatgtctagaattatgagcataaggattaaaacctaaaccacgattatttgtgctaaccttagattcatctaaaatcatgttgaggttctttttaccatcagaaaatcttagcaaataatttttcaaataagaaacctctttttccaaattagcacaatttttacaatctaccatgacacctttgcttttacgacacttggggcaagaaatcacttcattgtatttcacaacatcttccatgtactcaacacgacctaaagcatctttcaatttcatcttattcaaattatatgttgagcaatccaaaacatcatgaggttgttttaactttttagcacaaatcatgttaaacatcaaactagcatgaaaagcaatttgatatttttgcaacaactttttagttaaaaacaactcatccaaagtgcgtgtgtgcaaagcaaaactaagagcaagaaaagatctatttttcaaatcatgtgcagcattaatatctctaatttttgaaatctcattcattaaaacctcacaacttttgcaatcatcatcattaggaataagagattttaatctagcaatttcagaattaagagattcaatgataaattcctgttttctatatatcttttcacacttcttattttttgcacttaaaatattaatagcttcctcaaaagcacttatctcattgttttcacactctgaatccgattcaccacatgccatgaagcaaacaccggagatgttctttcccttagcttcatctccactatcaccatctacgtcgcttagtggctcaaatgcggcgtagacttgatcaaaagccttattgagattctccataatcctccttcctttgaacgtacccttctgcttgttgtcgttggtcttctcaccatctttgtcttctcttttgcctctcccaagcttaggacaatgcgaacgaagatgatcaattgaaccacattcaaagcaacgatttggaccacctcttttcctgttcctggcattattcatagctcgagcaattctgttagcaaccaaagccaaatcctcctcctcgatctgtttgagttggtcatcggatgtggcattaaaaacagcaaaaaaaaagaagacttagatgaagaagcatcaacatccaaagaagaagaagaagaaaccaaagcactcgacttagaatcaactttacgagaaagaacgttcatctcatgtgttttcaattttgtgtaaagcgaatccaaagtcaaagtagacatattaacagactcctgaatagatgtaacattcatctcccaaatagacatgtcaagagcattcaaaaagtgacgagaaatctcatattgtggataattagcatcataagaagaatcaacagatctaagatcactcaaaattttattaaacctagaaagatagtcatccaaagcttctccaggtttcatctcaaatttagtgtactcctttttgaaaatatcacgacgaagttctttaatgttatttgttccttgatgaaagttactcaaagcattccaaatttcatgagcagtttgaaaatgcgcaacacgatcatcatccgaacgagaaatcccactcaaaagaatattgcgagctttgcaattttgttcaaactcagtttttgcagtagcagtattaattacttcaggaatcacataaggatgagaaacttttctccaaatatcataatcttcagccataatgtaagattgcatcctactacaccaatgagaaaaatccgttcaatcgaaaacatgaggcttagttgaaaacctaacaggagtagccatggcaaaaactctagatcgataaaaatccaaagaagaaaacaaggctctgataccacttgttggatcgaatcacaataactaagccaaccagaggggggtgaatggttggtatacccaaaaaccgaaaacttttagcggaaataaaagttaccctcgaaatcgacgaaagtcggtctgaccgagattgatctaccggtctgaccgtgtggatgccgccggtctgatcggtatagatcaaccggtctgaccgccgaagccgcctgccgcgcctgctgccgccaccggtctgaccgcctcgctcccgccggtctgaccgccgccttgccgtcagtctgaccgccggtgaatcgtcggttagaccaccgaaacccggtgaaacacaaaccgaagaactcttaaagtagatgacgactttattgattctctctgtgtttacaaagtgcaccaacagcactccttacaaaaatttcgactaaactcgaaaccctaactcaaaactcaactcaattgctctcaaaagcgataccgggaagcctcacgctccccctctatttatacccgaggtaggcagcctaaagccacgaaccaaactcatactagtagtcctaaacaccttaggaaacccctttgccaataaattccaaataacaaaaccaataatcttcgatgccaattgttcatcacagaataataatcaaaaacacctttgattttacagattcatgggctcgtccaccaggatatgatgcgctcctcgccgatgagctgcgcgcagcgactcgaattgatcctagagacggctactgcaccacaccatgtccattgcaatgcaagcttctctgcggccaaggaggaggacgaagaggacgcagtcatgtattgttgtactttgaaaaattcataactatttttttcacgaacacgtaaaaagattgcacgtcgatatattagaaggaaaaaatagtttttttacacaacacaaccaaccaaactggtctatgccaggggaaggaagaaaaagcaaaaccaacaactgtagctaggaaaagagactactgcggcggctaaacgcaactccgatcagtgggaggggggcagggccacactacactcccaagaaacctccaaatatagcaatgccagcggaaaaccatagacagccatcttataggataaactccagaaccacagacagccctcccaagaaaagttcaaaactatgacatcccatatatccatccacacataccaaaagtgctacataacatacacatctaacttaaacttaacaattaacggtttttacacccgaggaggcagatgtcaagatgagtttattcagaattaacattacaatatatatgtatgcgcgcatgcacgcatttactttttggaaggtaccttcaaatattagactccctctccttattaatattttggtgcttatatataacatgcatgattcggtcaaacatttaaaatttatacgaaacttcgggcatcagttctatattatcatgagtttataagaatgtaataagtttatgatatataatgatattctgcttgcttttttatttaaaaaagttaacatctaatcaacaatcaaaattttaaaagcttaataattcctgtattaattctcaaatatatattatcagctggactgctggagtagtaattaacttgccatcatagagattttcattcaagcaaaaagtttgattaaacattatcgcacgatgcttttagtttattaaatactgtacgtgttgttcttttctgtgaacgacgacttctatatatatgttgatgtgaccacaattaattagctggcaaacttttcttttcaaaaaaaaatccgacctagtgcaggcctatatgagggcagaacaaaattggctgtgtttagttcagcgcaaagtttggattttagttaaaattgtgatgaaaaaggactgaactttggatacaaactttagatctaaatacagccattatcacaaaggagaagaagcatcgacgactttctccgttccaaaaataagtttatttttcacacacacacagatatatatatatatatatatatgtatatatatatatatatgtatatatatatatatatatgtatgtatatatatatatatcacatcgtaaaatctaaacagtgcgcgctctcgttttagtctaatcgcgcgacgcacctctgaccgtccgatctcgttatctatttattttcggcttacgttatcgctttctccactagtacttggctgcagacagtctgacatacccacgtagcaggaaggattgagatagacatgtatgccttttttctctttaaataaagttttctctcaaattacttatccgaactataatttaattacaccattgtgttcgttacaataaaatcttcacaacaagatcttacatgattatattacgatgaaaaaatatttatatttgtaaattacttttattatatacgtaagttacttttatcatatatataagttacttttagattttactaaattacttcttagacatataaaagtaaatttaataaagtctaaaagtaatttatatatatatattataaaagtaacttaaaacaaaacggaagtaactttgtcacgacattagaagtaaattcattgtagtgataaaatatgaatttatatagaaaactttatttaattagtacagatcaacacacataagtttaacaaattttaaaagtaagttcaatgttaacttcaacacacataagatacatactattgcatttttcaagttgaaaggagacactagatggagtataaactagctacgactagctgtgtagtcatgtccaatgaaaaatgcaagcattaaagttactttcttttgttctaagttacttctataatatttgtaaattacctttagtctttgctgaatttacttttatatgtctaagaagtaacttagtgaaatctaaaagtaatttagatatatcataaaagtaatttgtgatttttcattaaaatataatcatgtgagatcttgttataaagatttaattattacgaatagaacggtgtaatcggatcgtagatcggataagtagtttaagagaaaattttatttgaagtataggtggatagagtctctcataaatgacaaaccagctaccattagctgtgtagtcatgttcatatcacatatataaatataataaaaaatacaatacccttactttattaaatcctaatataattattcatctttttatctattcttaatttatttatttatcatttttatcaatttcgatgtaataattactaaaataattattttgagacaaacgaaaaaaagctaaaaataaacttaattactccgtaaccaagggtgtacgtgagtgtacggaccccacacgtaaaattctagtactgcttatgcttgcgatcgactaaaagctagggagagacagcaccattaataaaaaatttgtgccaagtcactgtcacgataactattttggacaataaaaggccagtccgtattgcagccaacatggtactactgctactattatacatatataaaactatatactattatacataaaaatgcggtaacatttgtgacacatgtgtgtatactgtgtgagtacatatatataaatgcttgtgacagcgatgcctgccggggaggggtaaacagttaggggatacgtagcaagttagtatcccatatacttgcacatatattcactttcatattttaattaacatgttgtctcgctaccaacgcatatacatataagaaaaaatatatgccgcaagggacaggtcactccaataacagagcaaattaaacaagtgaaactaaataacattattgaatagttagaacgagattgtatggcatatattatactcattatttgcagcttatgttgttcctctattttaaataggccaggaaaggtccagctggttgtggctccagcagcttcaacaagtagagctgcactacgaacaaaagtttcatgcttacgtttaattatgatgtactccctccgtttctcattctagcatttttcacattcatattgatgttaatgaatctagacatatatatctacctagattcataaacatcaatataaatatagaaaatgctagaatgacttacattgtgaaacggaggaagtaattgataataagacattaatctttatgttttctaaaacaaattctcgcaaaacagatgagtggttagagtttgaaacaaacaatatctgatgataaatattttaaaaaagagaaaatgatgtagttagaaaatgtcatattgtacaagttcaatctctgcaaagcattactcggagatattagttattagttataatgggcgtttttacaatattagttattttgctccacggcctcatcttttcgtttatgtttatacttatcagctaaaatttaaattttcaatattaaatttgaagttgattttgttttttttcatcaaagtttatttttcatcatttgcttttacaccgctaagaacacgtatataaaaaatttattcacaaattattttttgtttgcaaatatgccgaataaacgaaaggatgggtccgtcagttcttggccgaacccctatcgatcgaggagataatgggagataccccccgtgtgaatgcgtgatccaagatcatcaaatgccaaggaaaatgcaggatcgcatctgagaataaacgaggcacctgatatacgtgatgaacagacagctagctagctagctcctctgtaaagacttttcaatctagaatgattgccaataattaaattaatttgctgcaaggctcggaatctcttttagaatggacctacacaaacacacatcgatctagcctattatacagtccgtaacaaaataaattcatttttagataaacaaagttcactttactatcctctaactaccctgctttgtaaatcgataaattttatctctttattacccttgcctactctctctcatcaacactaccactctctcatcaaaactagtatcatttttactgataagaggtattttagacatccgtaccaaagtgcataacaaactggctgactctcgcattgcccctcccccttgggcgacaccggaggcgacgcccctgccgacgcacgttcccccctcctcccttctccgcctcgccgccgcctgagcggccaccgacaaagccgcgcagcgcaaggatggcggcggcggggcttcgtcttcgtgccacgctcgggcaaaggggggattgctcggggccgcacaaatcgcctagatctgtgcctcctggccagatctagaggcgaggccgaatggtggggcggtgactggcggtgctggcggcggtggttagaggtgtggcggcggcggaggagaccaccaaatccgagcctggatctggcggggtgggggccggcgacggcgtccattgacggcggcggcggtgcctggtggtggtggcggcgggcggccggatccggctggacggtggatggcctgcggtggttgggttcggccgcggcgacgagttgcaggtgacggcgtcagcggcagaggcgcgagaggctgcgatcggcggcggcaagcgcactagcgcggacgcatagaggccgtgacggcagcggaggctcgggaggccacgatagcaggcgcgacagcagcacgtgcctagacggtggcaagtgcagtgactgtggctggcacgacgatggtagctagcacggcggagtggccagtagctgtgtggtgcgaggagggcgacgaggccggtcggcgcgcggtggctgcgcaacgggaggtaaggccggtggaggctagctaggccgaatggtggggcggcggtgactggcggtgctggtggcggcggttggaggtgtggcggcggaggaggagaccgccaaatccaagcctggatctggtggggtgggggccggcgacggcgtccattgacggcggcggcggcgcctggtggtggcggcggcgggcagccggatccggccggacggtggatggcctgtggtggttgggttcggccgcggcggcgagttgcgggcggcggcgtcagatgcagaggcacgataggctgcggtcggcggtggcaagcgcaacagcgcggacgcatagaggccgtgacggcggcggaggcttgggaggccacgacagcaggcgcgacggcggcgcgtgcctggccggtggcaagtgcggtgactgtggatggcacgacgatggcagctagcacggcagagtggccagcagctgtggggtgcgaggagggcgacgaggccggttggtgtgcggtggctgcgcagcgggaggtgaggccggtggaggctgagcccagtaaggtggcgcacgtgaagactggccggctgggggcaccggtgcggtggtgcccacacatcgacgtaggtttaaatggcggtggagcaacggtgcatttgtggtagatcggcaggtgaaaccccagcctggccttggccgggccagcaacgataacgttcaagcgtcattcccctcctgagggtgttgtcgtgctgtctcacccctcaagtgtggatgcagggcaaaagcccagtctcgattctctctctaagaccttgacggacggcggcggcggtgtttcgtcgcttctctccttagagacgtcgtctaggcacccccttgccgaaaccccccttgcaattggtgcaaacttgctctagattctcatcctcttgtattggcatcctagcttttacaagttggtcatgtcggagggcctaggggtagaggagttccatcttcactctcaccctctctccctaaatcctgaagacttggatagagtggggttttgttagttgtaagggtcgggttctgggcgatctcggcggtgttccgttgttggcctagcggcggccggtcctgtgctagccttctcctgggtttgtgtgttggcgttttcggtatgtgggtggtggtatacttttttcgttttcctggttacaaccttccagggttgtaatctcgtaactttttcctgctctatcaatagaacttcgcaccgtctagtgcgagttgtaaaaaaaaaggtattttagacattttcgttctatcttcattttttttctaagaattaaaagataaacttatttagaaacgagagagtaaattagctagagatcggtgagtgcagtaggcactatgcttgtgaaacaggtaacagggcacagagccgagatcggcaaattaactagctatacagcgtgggccggcccgcacgcacgcgtcgcgcgcgcggtgtcgatcgatcgatctccgtgtggccgggagcacgtacgcacgcaggcgcaggcgagcacagtggccgggacagcgacggccggcgccggagaagacgcagtgccacgacgttgacgcgcgagcagccgttggccacaaactcactcactgatcgatgcatgcacgcagccaatgggatcgaaatccaagctaattttagctcgatcgcgcgcgcgcgcgttgccgtccacgtaaaaaggtcgcgtcgcgtcgccggtgtggcgggccggggtggggcgcgtcagcttttggcgatggcgtgcgtgcgcgccagctgtgcggtggtacgatctagctgtggatggatccgccgacggcgacggcgcggggacgacgacgacgacgcgggccggccgctggtcgctgtctccatcgatctagcgagtagcgctcgcgcgtgagttggacgctgcatgcaaatgtgcaatgcattcacctggtcatcccatccatgcgtacgtgttcccccaccacatgacaacacttgctactaatttttccaacaacgactatttgcttgacattatacaccgcacacgctcaggggcggatcccattaggcagggtacgtggatcgaccgatccagctacgacccgtgtcactctatactcccaatacctcctaccatttatagtagtcatgggccatcaaaattaggtatagtaaggtgtgaacacccaacagattagtccgtatcttaacaacgcacgcacaccgcaaacaatgatcgaggcaattatgcgattgaactataaatacgatatgtattgtgttcgattgttcttatcgagtgatcatctctgttttccgccccatctatattttaaagttacgtcgtcactgacacgctggttagcgtgccatcttaatacacgcttaggtgtgtatgagagaagtcaaaagtagaaatataagaagatatgcaaaacgagatgagtcataaacacatttgagtattaatgatcccaaactattttttttttaacgcaccgcataattttttttaaaaaaaaatgcatcgtttagctgttcaaaaaatgtgcatgtgaagcacgagtaagttttcctcttaatctcactggtggagagatgatttttactcctgattggaaaccccctatagtcccggttttccaaccgggagtaagaatccgagactaaatatcgctatctttagtcccggtttaaatgcccgtgactaaagatttagtaaagttttttcccatttttttctatttttttctattttgtatatctcactcccattatcttaaatcattcacagcaatatagtcatcccaaatcattcacaataacagttcatcccaaatcattcacagcaatcatcccaaatcattcacagcaatatagtttattctcaaaatcattcacaacaataacacagatcgaatcatgcattaagaaaaaaagaaataaaaattcacgcagcagcgccggcctccaccgcctgctgctgcaccggcctccgtgccggccgccaccgggcgcggccctccacgcgaggccgccgcccccttcggatccggcgacggccggccgcctcctctcccagatccgccacgcgaggccgcctctgctgccacccggctgctaccgtgcgaggccgccgccgccaccgccacccggccttctgagaatgggaaggagagaggaggaggagatgaggaagaggaagagaatgaggagaggaggaggaagaggaagagttaggggtgaagaggaggaagagataatggtgagggaggaggagatagaacttattaactaatcctgctttctcctcctcgatcttgcgcacgcctcgtcctctccgccgcacatgctgattttttttcccggttggtgttaccaaccgggattagaaatagatatttagtatcgggactaaagataatagagggtctaacaccgcctgctgtttttttgaaccaggactaaaaatgatctttagtcctgataggtgttcccaaccgggactaaagataaaaaagtagctctaaccttttgaaccgggactaaagatatctttagtcccggtttttattgcaaccaggacaattatgtaatttggtcgaccgatcaaaagatggtttctccagtagtgtctgatgctaccaaacgtcaccaagaaaactttccctcatagttagcacccaacgaaactggatttccattgctctctagtcttggcggttattaattaacagttggtcgataaaatatattgtcttcccggtttagtttgatgttatccttgatggtttatggttgcgaagaaaattctggtttattgtagggacttcccggccctagcttattactactaaccaaatactcctccgtattttaatgtatgacaccgttgacttttcgaccaacgtttgatcattcgttttattcaaaatttttgtgtaaatatgaaagtatttatatcatgcttaaagaacatttgatgatgaatcgagtcacaataaaataaatgataatttataaattttttgaataagacaaatggtcaaacgttggataaaaagtcaatgacgtcatatattaaaatattaaaatatagagatagtatatagtacgtacttccagctcgatttggttcttttccaccacctgacaagcaagcaataggcatgcatgcataatttagatcatccaatctgtgacggtatttgtcagcttcctagctacatgtatggtccattataatgcatgtctactgtgtacgtggcaggcgccctgaactgaacccatataatttgagtgagctatatataggctatatctactgaagtttaagtcacatggaaccaaagacagctggtctagctagctgcaatatgcagctaggatatgttgtttgaagctaagtgctttcctttcaatatcctgcagtacttgcaaattactgtggtacggttttgtacttctcttgctgatctgaatgaatgaggagttgccatggctttacttacattattggtaatttactacagctggccgatctatcaatctaaagtcttcaaaccaactgggaagtgaagcgctcacagaattttgtgctgccgtggccatcgcggggtcacaacgcgtggacgcgcacttgagagcgggtggatttcgcggcctctcgtgagtccgcgtcggccctcctatactacgtacctccatattttaatatataaccaacgtcataaaaaaaatcggagaaagtactatatactctttttattcaaaataagttactaatacggatgtgacacgtctcgatacaacggctactattcaaatttgtaatattgtgatatgttacctctcataataaattaatttattttagaacagaaggagtataatggacaacctgctagctggctattgctgtatcagtggacatgctcgcagcacaatattctacctttaatcatgcatagacgaatgggataagattctcaacggttaaatcatccatatgtgctgatcattagttgtagctagctatgctgctatacagtcacagccattacatactactagtacagaaactatcataggttctggttgggaaccagttataggtgtcagttttctaactgacacctattggtcggcaccaatataagcaaccggcatctataggttcgtacgagcaagaaaacgagctagctcgaattgagccgatctcacaatcgccatcaccgtgccatgcccatatcgagttgctcccgacattcccaaatccccacatatcgcagatcacagatcgcattaacatactcaacaacaaaatcattcacaaattcacataaacattaaaattctacaaaatcatccacaaaaatccctcgggcgccgcctcctgctgcctctcctcgagcgcctcctgcccgccctggctgcccaacgcctccctttctcaccggatcaagcggaggggagggcgcggccacagccgctaccgtccccgaggtctgccgcctcctctctggccggatcttgcggagaggagggtgcggctgctgccgctgctgcctctgccgggccgctgaagcatctaggtccccgttgttaattttgataattaatgacaaacgctaattgtggactaaccgttgctattgagataatattttaagttaggtccacgtcagtgtgcgcatggatgactatcgatggattaaaattgacggcgcaaagcaaagagaaagaagacggtaaaactagtgctttaatttagaattgatcgaggtgtagggcgatcaaatttgctagtttactttttagtttcgccgtactattaagaggggtaataaccttgcaaagagatgattttaattgccgtattaggtcattatgcatttagacttgtgctcgtttttcatcacacacacacaatcacttaggatttcactggtttcggcctgaccagtggcggtctgaccggcaagacggcggtctgaccggcgcataaggccggtcagaccggcggcacatgagcggtcagaccggccccttggaggccgggatggtgctgctcgggatggccgatacagagccgacggagccgtatttggccagaccgaaccgatggcggtctaaccgagccgaggccggtctgaccgcccactcaacgccggtctgaccggccagtccgatggggccctctgacagcactacaacggctagttttctagccgttgcagagtagcacggtctgaccggccacatacctaggattgctaaacattaacataggagtgtgatttactttcctagagatataattgagccactatcaccctagatttgcaaaacataacttagttgcttagttagagttcaccctcaccaagcctagcaacttaggttagttttgattaggtgtcatttagttttaaatagcctattcacccccctctagtcgacatctcgatcctacaagtggtatcagagcttggtctctcttgattgggcttcaccgcctagagagaagatgtcgaacgaggtgaaccatgtagggaaggctcccatgtttaatggcacaaactactctacttggaaaattaaaatgtctactcacctcaaagctatgagcttccatatttggagtattgtggatgtagactttgctatcaccggcacgcccttgacggagattgatcaccgcaacctccaactcaatgcccaagccatgaatgctttgttcaactctttgagtcaagaggagttcgatagagtgagcaaccttgagaccgcatatgagatttggaacaagttggcggagatccatgagggcacaagcgagtacaaggatgccaagcttcatttcctcaagatccaatatgagacattctccatgttgcctcatgagagtgtgaatgacatgtatgggaggctcaatgtcattgtgaatgatctcaaggggcttggggcaaactacactgatcttgaggttgcccaaaagatgcttagggctctaccggagaagtatgagacccttgtcaccatgctcatcaactccgacatgtcaaggatgacacccgcaagcctcttggggaagatcaacaccaatgacatgtacaagttgaagaagaaggagatggaggaagcctcaccttccaagaagtgcattgctctccaagccgaagttgaagataagggcaagggcaaggtgaatgaagtcaatgaggacttggaggaagagatagcccttcttgatagaaggttcaatgatctcttgggaaggagaaaggagagaggaaggggctccaactcaaataggagaagaaataaaagacccaacaagactctctccaacttgaagtgctttgagtgtggtgagaagggacactttgcttccaagtgctcttccaaggatgatgatggagacaagtcatccaagaaaaagagtggaggctacaagctcatgaagaagctcaagaaggaaggcaagaagattgaggcattcatcggggaatgggactcaaatgaggagagctccgcttcatccgggtccgaggaagaaggtggtgatgatgcaagctccaagaagaagaagatggccgttgttgccatcaaggaggctccatcattgttcgctccaatttgtctcatggcaaagggctcctctaaggtaacatctcttagtgatagtgagagtgatgatgattgtgatgatgtttcctatgatgagcttgtgagtatgtttgaggagttccatgcttatagtgaaaaggagattgtcaacttcaaggccctaaagaaggatcatgcttctttagagatcttgtatgaggagctaaagacctctcatgagagactcaccatttctcatgagaagcttaagaaagctcatgaaaacctccttttcactactcaacatggagctctcattgatgttggcatatcttgtgatttgcttgatgatagtgctacttgccatattgctcatgttgcatcatctagcatttctacctcttgtgatgatcctgtggatatgcctagctctagctctagctcttgtatttctatttatgatgcctcacttgttgttgagaacaatgagcttaaggagcaagtggccaagctcaacaagagtttggagaggtgcttcaagggtaagaacactcttgacaagattttgagtgagcaacggtgcatccttaacaaggagtgacttggattcattccaaagaagggtaagaaaccttctcaccgtgccattcgttttgtcaagtgccgtaaggttgggcatttggtgaatgattgccccggtggtaagccttctaaaacatgcatgtttgattctcattatatgcttaggacggctcataatggtagcattgttgctagatatgtgggttcccctatactcagtggtaaaaagaatgtcatttgggtgcccaaagctttggtctctaacctccaaggacccaaacaagtttgggtacctaaaagagcttgatcttcttttgtaggtgaactaccgcactggtggaagccattgggtgcttgatagtggatgcactcaacacatgaccggtgatagagctatgttcaccacatttgaagaaggagggaaagaacaagaaaaagtgacatttggagacaatagtaaaggaaaggtaattgggttaggtaaaattgctatttccaatgatttgtcaattgataatgtctctcttgttaaatctctaaatttcaatttgctttcggttgctcaaatttgtgatcttggcttgtcatgtgctttcttcctgcaagaggttattgtttctagtcttcttgacaagtcttgtgtgttcaaaggttttagatatggaaatctttatttggttgatttcaattctagtgaagcaaatttgaaaacttgtttagttgcaaaaacttcattgggttggctttggcataggaggctagcccatgttggcatgaatcaattgagcaaactttcaaaacgtgatctagttgtgggcttgaaagatgtgaagtttgagaaagataagctttgtagtgcttgtcaagccggcaagcaagttgcatgttctcatcctactaaaagtatcatgtccacatctataccattggagctcttgcatatggatttgtttggcccaacaacctataagagcattggtggtaatagtcattgtcttgtgattgttgatgattattctcgctatacttgggtgttctttttgcatgataagtctattgttgctgagcttttcaaaaagtttgcaaaaagggcccaaaatgaatttagttgcactcttgtgaaaattagaagtgacaatggttccgagtttaagaataccaatatcgaggactattgtgatgatcttggtattaaacacgaactttccgctacctactcaactcaacaaaatggtgtagtgtagaggaaaaatcgtacattgattgatatggcaaggactttgcttgatgaatatggtgtttccgattccttttgggcggaagccataaacaccgcttgccatgcaaccaataggctttatttgcatcgtctcttgaaaaagacttcctatgagctaattgttgggaggaagccaaatgttgcctattttttgagtttttggttgcaagtgttatatttatcgaaagggtgttagattaaccaaatttgaaagtcggtgtgatgaagggtttcttataggttatgcttcaaatagcaaggcataccgggtctacaacaagaacaaaggtattgtggaagaaaccgccgatgttcaatttgatgagactaatggctcctaagaggggtacgagaatttggatgatgtaggtgatgaaggcttgatgagagctatgaagaacatgtcaattggagatgtcaagcctattgaagtggaagacaagccatccacctccactcaagatgagccatctacttccgctacgccaagtcaagctcaagttgaagtggaggaggagaaggcacaagatccacctatgccaccgaggatacacaccgctctttccaaggatcacccaattgaccaagtgttgggcgacattagtaagggtgttcaaactcgatctcgtgtcgcttcgatttgtgaacattactcgtttgtttcttgtcttgagccaaaacatatagatgaagctctttgtgatccggattggatgaatgctatgcatgaagagctcaacaattttgcaagaaacaaggtgtggactttggttgaaagacctagaaaccacaatgtcatagggacaaagtgggtctttaggaacaaacaagatgagaacgggttggtggtgagaaacaaggcaagattggtggcacaaggttttacacaagttgaaggtttggactttggtgaaacttttgcccccgtggcaagacttgaggttattcgcatccttcttgcatttgcatcatgctttgatataaaactatttcaaatggatgtgaaaagtgcttttctaaatggtaaaattgccgaacttgtctttgttgaacaacctcccggttttgaagatcctaaaaatcctaaccatgtttataaactctcaaaagctctttatggtttaaaacaagctccttgggcttggtatgaaagattgagagattttcttttgtcaaaggatttcaaaattggaaaagttgacaccacccttttcacaaaaatcattggtgatgatttctttgtgtgtcaaatttatgttgatgacatcatattcggttctactaatgaggtattttgcaaggaatttggtgatatgatatctagggaatttgagatgtccacgattggagagttgagcttcttccttggacttcaaatcaagcaactcaaggatgggacgttcgtgagccaaaccaagtacatcaaggatctactcaagaggtctggcttggaggatgcgaagcccatcaagacacctatggcaaccaacgggcatctcgaccttaatgagggaggtaaaccggtagatttaaagctttatcgttctatgattggtagcttgctttaccttaccgcatctaggccggatatcatgtttagtgtttgcatgtgtgcaaggtttcaaaccgctcctaaggagtgtcacttagtggccgtgaaaagaattctaagatatttaaagcattcctctactattggcttgtggtacccaaaaggtgctaagtttaagcttgttggctattccgattcgaattatgccattgcaaagtggatagaaagagcacatccggtagttgccaaatgcttggtagatcctttgtgtcatggtcatccaagaaacaaaactccgtagccctctctaccgccgaggcggaatatgtttcggcgggtagttgttgtgcccaattgctttggatgaaacaaatattgttggactatggcatatccttcaccaaaaccccactcctatgtgacaatgatagtgccataaagatagccaataacccggtccaacattctagaaccaagcatattgacatacgccatcacttcctaagagaccatgtagccaagtgtgacatagtcattagccacataagaaccgaggatcaactagccaacatctttaccaagcctcttgatgaaacccgcttttgcaaattgaggaatgagttaaatgtcatagatttctctaatgtggcttgagatggtgcaccatggttgtttctttttgcattatgtatatttgctctcatttgctcttatgctttggatttgttgccatttggttcttcattgcgaaaatggagcatgtcacattaagggggacttttgtactcttgcatgtgctctacttccctttatatgtgagcaaatcaactagtggtgctagtagtatttccaaaaatgcccaagtcaacataagtcaaaacttttgcaaaatcaatgtaatttgaaaactatctcttggaaaatgtttcaaaaggtttcctatatgttttccacacctcacattgcaagaaaaatgatttttgaatgaaaatcccattttggccctcttttgaagaaactagattcttagttttggccaaaatgagattgagaaggagtttgagaaaagtttcaaaacaaagttagtagagaagaagatttgaaatgtttttggtattcaaacctatttcaaaaaccaaatcattcaaaagttatttgaaaatcaaattcgcccaaaaacccctatagaccataaaaggtcacctcctagcactcaagtgagttttgttacaaatcttcataattttcaaatgttatgaatggttggcaatatttaaactcacacatttcaaaatatgctccaaaagtcaatttttttatcgaatttcattatgtgggggttgtcggcctgtgcaagggctgtgcacagccggcaggtggcctggcggtttgaccggcgctatatgcgcggtctgaccggccaggtttggcggtctaacaggccacatagggccggtctgaccagccgaggtgggcccagggaatttttattccccctcttcttctacccccacctacctctctcctcctcatcctctcacttccccaactcgattttttcttcctctctctcacctcccctcaaaccctaactccttcctccatcaaatccattcaatttgaccacggatttcattctggttacaccgtaagtgattctcctccgcttcctctctctattccatggattagtttgtgtttttgttgagtttttgatccatggcatggaaccctaggtgaagcacgaggtgttcttcaatttgcaccaatagagggtagtttcttggtgtgattcaactcctccaactggtaaatccctctccctcttgtgcattctctcaaatcgatctatttcaccctagggctatgggtagttgttccaatcttgatgaaataggtccaaccctttgatgttctagttccactcttgtgcaatattgttctagcaatttttagactcaaatgagtagatgtgaaaatttttggatgcttgaacttgtgggaggaggtctacctggagccacaggcggtctgaccgtgggtcagccgccggtctgaccggcgagtgcgcccggtctgaccggctggcaaccgtctgaccggcctgatgccgtcagacgccctgctggctgtggtctgaccacccctccataggatatagtcaaattttcacctctccaaattgtttctagaattattgctaatatctatcatcctttactctttgacagtgatgcctccccgcacttgccatggtcgtcgtgcacccactccggatgccgtgagtgagcctgaggaatcgagcggagatgattatgctcaaagtgatgaagaggttgaggcaaatgttgagggggctagtgaggaggctagtggagatgataacagtggaagtggagaggatgaggatgaaggaagtgataatatgcacattgatccctccatccagtttgttgtgaacatgaggaatccatcgcagtataccatcttgaggcaccatgatcagtttttgaggcctcgggacaccccggatccccgttttcacaccgctttccagaagtctgtgtatgagcaggtttatgcagggaaagcatttgcagagcataagtggatttcttggagagacataaatgagactccagagtttgagggattgtaggatctcttcaagactgttggcattgactggattgtgaccctcaagcaagactacaatgaagatttgatccggcagttttatgttacagtgtgggtggctggggactatagtgagatgaagtggatgtccgacaccctccactgttctatctctaggaggcaattccggcggctcctcaatattcgcttggactttggagatgacttgcatgagaagcacacccataatctgctctccatagactatctctctcagttttatgaagatggagtgcggtacacacatgggaaggttgccggcttgaggactatccccagtgtggttaacaggattgtgagagctaccatcctccctcgccttggcaacaatgatgacattaggggggtggcttggcacgtcatcgatgcaatcattcagggccgtcagttcgacattgtgtctctcatgatgcaagagattgccatctccaaggggaccttcactcagggaatctattatgccccttacatcatgaggttgattcaagacaagcttggggctgctgggcaaaatttgaagaagcacaagcagtacaagccccgccttcagcttggagctccctgtgctcctagggcggcgccctcctctcatcctggagctagctcaagctcagcacctcttcctcctcctcctcctgggtatgatccaaatactttcttccatccacagtatgcttattttggaatgcaacccaacgagtacttcaacccggtacttggagctattaataccctaagtgaaagcattcaacgcttgtctaccgggcatgaagctttgcatgaggatgttcgtggcttgcgcaccgatgttggagacttgaatgcttccgtggggagattgcacactagagtgggtacattagattctcgagtccaaatgttggagagctcccaagcatttgtgtatcatcgtagtcatgatgctccttatccttccactttggtgcgtcctccttctcctccacaagagtgaagacatttttggtgcttaatgccaaaagggggataaaagtgtgctttatgttttgtgggttgggactagtagtagtgaggatagtgccctcatatctaataggttaaggtggtttgggctatattttgtatgggtatgggctattactctatattgtgtgttctttgtcgttttgttaaactctatgtcatttggaccctttgtggtcttgtaatagcctatgtttatttgtgagcccttttaggatgatttgtgacttttgtgatttgattggttaagtgatgtgaacttgtgcgatgatggatggtgtatgcgatattgatatatatgtgaccatcttatgcttatggatgaatatttcttgaagtttacattgagatattgcttatgtgtttgtgcttattggaatgtgaaattgaaatgtgcattggctccatatttgttgtctatgattgatatgcacatgtttacggggagcttttgatttccattgcaatatatatatatatatatatatatatatatatatatatatatatttgtggtgtttgtcatcaattaccaaaaacggggagattgaagcatctaggtccccgttgttaattttggtaattaatgacaaacgctaattgtggactagtgctttaatttagaattgatcgaggtgtagggcgatcaaatttgctagtttactttttagtttcgccgtactattaagaggggtaatgacctagcaaagagatgattttaattgccacattaggtcattatgcatttagacttgtgctcacttttcatcacacacacacaatcacttgggatttcactggtttcggcctgaccagtggcggtctgaccagcaagacggcggtctgaccagcgcataaggccggtctgaccggcggcacatgagcggtcagaccggccccctggaggccgggatggtgctgctcgggatggccgatacagagccgacggagctgtattcggtcagaccgagccgatggggtctgaccgcccactcaacgccggtctgaccggccagtccgatggggccctctgacagcgctacaacggctagttttctagccattgcagagtagcacggtctgaccggccacatacctccggtcagaccagcagagcacaaagttgggggattttgcccccaacggctagttttggttggtgggagtataaatactccccctccagcagcaagggggctctcttggtacccaatttaattgcatacaccccttgcacctctatcacacccacttgaactttgtgttcatccatctagtgtgttagaaggttaattagccaagagtcaagtgctttgcttccatttgtagagctagtgtggcacttgattgatcatctccacgccgggtcattgcttgttactcttggaggttgccgcctcctagacgacttgtggaggagttgcccggtgacctctccgagaagattgtggaggaggcccggcgccagtttgtgagtggtttggagttcaccaccttcggagtgaaggaagaactaccctagtgatcgaggcttgggtagtcctctccataagccggctcccgccttgcccaccccttgacgaagggggcgtgcggtggcttcgtgattgagcggtggagttgggctcaccttaacgggaagtaggaaaccgacgagtttccgaacctcggtgaaaaatctcttgtctccttgtctcatttgattgtcgcatttacatttgtgcaatttacatttctagagacatacttgagatcatatcaccctaggattgctcaacattgacataggagtgtgatttactttcctagagatataattgagccactatcaccctaggtttgcaaaacataacttagttgcttagttagaattcaccctcaccaagcctagcaacttaagttagttttgattaggtgtcatttagttttaaatcgcctattcaccccccctagtcgacatctcgatcctacagccaccgccgagacaggcgagagagtgcgagggagagaggcaagagagaaagagagaaggagagagagagagatgtagagacggagagagcaagagggtttgagaagatatggacggaaagacaaagagagcgagatggtttgagaagataaggacagagacgatcggcttgccagctcggctcgcctcgatataggtgccggtttttttaaatgaccaacacctattgtataggtgccggtttttctttagaaccggcacctatagttgtttaaaggtgctggttttatgtgtgcttttagtctgcggagaaaggaacaatattataggtatcggttttaactgttgcatcacctatagtggcaatctgtatgagctttgtttaagtagtgtacggagaataaacagccatatatataaaatgactctttcaagtaaataaatgagcatcgccatcgtcctacaattgatgtttgcgtaaaatggcacacacgccgtccggtttcaacagcctaggatgcccctaataaacagaaaatgaattaagctactcggtacagagacttaattataattaattaggtgtatgtataattgttggaatgaagccatcatatatatcgatcctaagctatagctgcagattaattattgaatagctagctctacttgtttttgagaggcggcttgagcttagctagctttgctaaattgatcattaattgagaggcttgaacttagctagctttgctaaattgatcattaactcaaacttgaagaaaactagcttctctctatctcagaatataaaaatttctagcatttaaaatttgtcacaaaaatatatataggaactctgttacacacttctcatatcaagcaatcacaactatctgatatcatttcatttctcttcgtctttcttaacttaaccaatcataattgaacatcacctacttataatttcatctcttttattaatctctataaagaaaaccttaaaacctagataaaaagaactatatatatagatatgtttatattttgagatctatatgtctatattttgagactgaaggagtatacgatagctaatacaggtaatattgatatggggaattttgtcaaggcgggtcagggtcacagcccgtgcgtcgcgtcatcagaaaaggggcagggcccgggcattgccaggccaccacctgaaggccatcagccaacacccagtactatccagctatagcgttgtatagcctcttcttgcatgatcaatcaaaatctaatggatgcaagctagatgtcacagttagggcactgtcgccacaatgtcctctcttggagggcatatacatgcactaattattattaattcttggaataactagtctggatcaccatgattataactccctgttaaatcctgacgcgacagccagatgaacagtgtgactaattgtgtgcatatggattagtagttaatttgattaattctgcagccaaattgacctgtgtttatgttgatgatgatgatgattatgatgatgatagcaactgcagatgaattcgcactctcgttcgtacgtacgttcaaaaactacgtcccaactaatgctagctgatgatgaattagtctctccgggctccattgatctttcttgtgtgtttgattgatcatgttgactgcagaaaagtattggagctttgctgtatgttcgttgttgctgtacgtgtgctaatataattaggctattagcagtagtttttgtgtactgattctctagagctgtagcgatcactgatggtgaagtagtcggttgttgcgatattcttacctgtccttttttgacattttcttcccttccagtacatgtacatgtaacagtctctcgtattaattgtgcactacctccagtgaaaaatatttgacgccaaatatatgctccctccattttcaattataagggcccctttgaatcgcaggattaagaaaacgtaataatagaaaaatgtacaatattgatataaatgtaggtgtaaaatagaggattgcaaaacacaggaatgacggtttgattggaccgcaggaaaaacacaggaattagaggagagataaagactcaaagaaaagtttctattaggtagaacctcatgttagttttcctacaaaatttacatggcattaggtattccatagaagttttataggattcattcctttgattcaaaggaatatataagaaaattcttgtaggaataaaatcctctaaaatttctatgaatcaaagggggcctaaaacgcgtatgcatgtatgtatgtaattaattagcacatctcatatcttatatgtcaaaaaattagcgcatcccatatcctttagtttgtattttaaatcatatattctcaagatctctaattttattggattcgcgcatgcattatatttactagaattacataaacgaaaagatgatgataattattttttggttttttagttacaccgtattactccgtactacattttagaatagatggtatagtgattagtgatttgtcataatagtaataatatcatatgtgtatatgcgcaaattttagtgattggagtaatgatttgaattgtacgagtatatcagtgttataatttgatggtggtgaatagtataattagttttgttggtgaagtaattattacaagagaatgggcggctataattgttgggagggagacacgtgtataagttagaacaggcagcagacagcggtctctgtcgagcgtcgcgacaacggggcaataacttggaaagcgattgtcggcatcacctacgggcgccacgtggacagcatcactcgaatgtgggcccagcgccgtttcacaccacgaacatcagtatacgatctcaccggtttccaaacgtactccccctttttcttggtggagattaaagagatagctaaagttaaatagtgatggtttgtgtttggtttaaatgaaatactactagttgatagagaaattaaataaaaaatgattatcattggttgagttagaaaggaaaaatatgtagtacatatcccattgaatctaggaataaaatttttactcttagatttgaaaatgattacaaatggttgagataggaagaaaaatatgtagtgcaaaacacatgtacactaaaaatctagaaactaccatttaatctgggagtacaatttttactcttgttgatgtggaagcttccatttctagatccaacagtaatttctaggttttcacagatagaaaagtagatagagagattgctactctgcagtagagaagggtgtgataccattttttttattttttatgtacttttatccttatattaaaaaaacacgtacacataaaagtatgctctgcatgttagcaatgtttgtgtgcatatatatatatacaactgtacattttttatgaatcataaattaattgtctaaaatttatatcatcaaatctaaaatatggatatcaatagtgtgacgtatatacacatgcttctttatagaggtcatatttttatcggaagtcgaagacatatattagtattgcaaagaaagaactcatatgccattaattaagctatatctggtaattaaacccatgcaatgcatgctcagtaaacaagactcgagtggggactacggagtggctcgttttcagatctgacagaagagatgatgaaatgatcagaaaacgtcgagcattctaattaagagggctagccgtcaaacctagctacaacttaaaaatacgatatttgtgaaataaatcatcaagctaaaagtatggtcagcaaatattaatcggcactaattactccttttgacaaaaaaaaagaaaaaaaagaaaagaggaacatatcaaccaaaaggaaagtaactttgctgcatgatggctatatataattcgtgcagccataaagaggagcaaaagatctaggtctctgcaggcatgtcgtcgttcttagcttctttgtcttcttcctcgtgcggtgtagctctagatcaaactatgcaattaatcccagtcctgtaattaaaattcatgcaagatttggtgaaatttgtggagaacaaaatcgataatcctagctactagttgcgccgtcattatcgcattgcaacgtataactgtcttgtgatatgtccacgcaatgactagtacactgctccctcctgatctcctctgaattaaaaaaagagatgatgatatgatgatgatagaacagaaaaataaacagtgctagcgctgagctgctatatatctgacttttcttcgttctaatgatgatgagtcatcgtgacaacgcccctcttgtttaatcgaaaattaatcaatgactcgatatcgaatctgcgattaagaataatgtcaatgcgccgatcgaatcggatgctgtttcttgtgccctacttttgggcaaagcaattaaatatatatctgatattaaccggttaattaatttactcgattatactattagagaagccatgatcttatatttagccgtcgtacctaccaatactaaaagcagacaagaattcaagacgtcgtccaaccacagctctgcaacggctgcacagagacaagactcttgcatacattgctttctttgtttagggcaagagggcgccgccatttgcatggagtagttagggttaattagttccatatactccagtatcgcgaaagctacgtacgtacttcaagtactatatataataaattaattggtacgtatatacttgctaagtgagttttggaatcaaataaattaatgcaaaatttcattgtacatgcaaaatatctgcagaatttttatatgggattgatcttaaggtggattgggcatttaataaacaatatgcatattttgtagatacataattatgcaagggcacattcagtggctataatgaatttaatatccgttgtgctaaagagcgcacctcgcagtaacccactcgactcgctcccctccccttccctcttatgtataaaaggttaatcccacgtctcgcctttacattggttttgtcgctaggatgtccatcagtctcctcccgtcccctcccccctctctccacttgatgaaaaaaattatcctcatctctcaaagaattgaaaagatcttgcaagtaacttttttccaatgctagcttcctctcatcttgatccattttttctaccataagtgatgtgaatttctttttttacataaagacaagggggatgggggtacgtgtggacgggatatcaggagagtgaggaagggggtggatggtacaggtggagaacctaccaacaaaattaatgtttgggtaaatgtgagtaatattttttttttacataaggagagaggggaaccagtctctttaccaaaagcagtgtggtgtggctccttttagcacgcactcgctccccctctctctctctctctctttatctctctctaagatataatagagtgagcaacaaaattgtccacggcaataaggaaatttgccacgtacatgtcgcaaaggtaacctttagctatattagacgaaatttacgttgaattgtacttcttttttttaactgaagcaattcacttaagttgtcatcacaagcgcactaattctgtgatggaggtgacattaataataaaatccagcgagagatgtgggtgacaaagtgcagagtggagacatgtagagacatggttctctttcagtaaaaaggtatacgtgttcaagtgactgaaagagcatgtcaatgtacaccttataaagtattgagctacgacatattgctttagtttttagctcatctatcacccaattcagtcaagtgtgatcgagagatcaaatgtttttcaaagaatcaaaaggtgctcgacctaataatggccgatatatatcatgttaattaatcccaaagggatcaaccaggcagctagcagcaagcctccgcgagcaagaatcggctttatttggtcattttattaacttgttaattaattaaacatgtttaggtgagggattaattaattaactaacgggaggagtggtgcaactatgctgtcattaattaatcaatctagggtaaattaatagcacactgacccatctcgtttagcctctgcttatctcacagcccttggagcgatgcgtctcccggccaaaattctattgcccgatcgatcgattcggatttcgccgaatctaatgatgtcaatcacgcaatgatttaattagcctaatctcgaaagccacttctccaccactcattttgttaattaatctctgggattatattagtaactagctgtagtggaaggtggcatcatatgcagcatgcaaagatttttattaactatatgtggaaggggtagatgattaatttttgtataaatgtagtaaacactttggtagcacagttaacgccttgctataataggagatgtacacatatatatatacacacacacacacacgatcgtcgcaatcattaaccattctaatacgtatacgtatctgtagtgtgcaggtcggccggaggaaaccgttaaacaaacattaacttttgaaaaattatttaatctgcttttgttctctttttgtttggaccttctccgtgcatggaaagtttgtgttctaaatgtagaagcttgctttggaccaatttgggttgatacaaaagtttcatatagtagcttttttgtagtacgtaggccaattgatcatgtgaaatttatttgatcatatatatctcttcctattttaattcaatttaataagcctataaatcccacataaaagcttccttacatttctacagctaggttgcctttataaaagagtacttactttccatatatactccaccttttgtacatcttgtttatatggtcaaatggatataataaatacatgcaactttccctattcttttattgattgtgtttttttatatggagtgcttgaaatttatcatacagcctataatataattcttgggaccaccaaaatcgccacataggtatacgataagttgtcttggtacatgtaagggtaaaaaaaaattttcacatatgggctatggtaaaagggtagaaataggaaaataactttttttcccaatggtatatgtcaaatttagccttacattattaatttgttttctcctttttttttcttatactgatcatcgtataagtttttctaccaaaaccaagaaagtctgattttcctatattttatttaatgagaatgtgatggagaaaaatcaagaagcatgcacactttaactttccccacgcacaagaaacgagagctttactgccccaagtgcatgcatacacttctggttatatgatgataatatatatgtaatggagggaataatatataagcgaaagtcgccatcaatatggaatggcatgtatgaggtgattttagtggacccaccaccaaagaactatattaggccacataacaaatttcaagagcttatttatagaaaaaaaaagaaaggtcgagtagtaaattgaccccagagcaaaactttagatgccatagatgccataaattgttactctccctctgaaagctcttctttgataggaaaaaaatttcataggaactacacattataatttccgtctaaatatacaatcatacatatatatttcatccgtttcacaatgtaagactttctagcatcatccatattcatatggatattaatgaatctaaatttatatgtgtgtctaaatttattaacatctatataaatatagacaacgctagaaagtcttatattattaaacggatgaagtaccttgtttctacgtacgattcaaacatggtatataagataaacatgtcgtcgtctgaacaacaaataaatattttgtctcgatgtcctcttggtagttgcacgccgaacgttctgcccatttttcagcgtaatcggatagaattgaaatccatatcttcgtctgcttctagcagctagcatcagcttgtccgtatgcttcagagagaggaaatatcatcgccgtccacaatataatgccgatcgaacactgtactaagatatatataaaaaattttgttgctgaggcaagaactagaccggtgtcgttgctggtccaacttggccaatggccatatatatatatatatatatatatatatagttttgcatatatatatatatatatatatatatatatatatatatatatatatatatatatatatatatatatatatatatatatagacacacacacacacaccccctagtaatagctggtcccatgtacatatatatgcttaattgggttagctcgagctaactggggtgccaaaatgaatgctagctctagtttaagtgcatgcttggtcaagatggataggggatcagatctagtttccctgtatgcgccccaccaaatcatcacggccattgatatgtcccctgcctctaattaatctgatccactccgttaaatatataaatatataaatatatatatatatatatatatatatatatatatatatatatatgacgtatatatgttgttgattttatttggtcttgacactttgacttaattctatcaattgaggaggttttatccagatggctagaatacatgcagttaattttagttctgcagacaaacataagtgaaactattataacaagaagttttatggtgtttgtataaaaaggaataagaattcgactctccataataaaatgtttttaagtattgacagaaatttttaggtaagaaactaggaaaaaaagtaattttgctagtagatggacaagagcaagccggattgtctttgatattatttgatagtattaattagttttcccatcttcagtacgtgatagttatttatgtatctatatattatataatctgtgtgtgtttttttaggttatattgtgtccccaagaacatattgggttaagatatcttcatttcttttgtgttgttcccatcaacttgaactgattaactgctgcgcctaacctctaaattaacctgtggcgctggagtgactgagggaggagagagagagaggcggaggagaagaaaaaagaaagactatgttcgttttctattttcccctactgatatgcccatattattaatgattaattactccgctgtcatcggctataatagtttttattctgtatcttactcctctcttaatcaatggtacatattggttcacctctcaataaacaccgtaataatttatcgtgcaaaaaaaaaggtaatcaaactcagaatggggtgtgtgtactgaagaaccatgtcaatgtcctaaacacacatacacataaaaaggaacaggtggaaagtatgtatagattgattggatatacttagttaaatactaaagtcaatgcatgaaccacatgttcatatatattgtattgtacttaaagtatcatcaccatgtacaataataataatacaacgtaggagtgttggtacgtactcaacgatcagtaacatgcaaacacatcgcacttttgttaggtgaagagacagcaacgtggcagtgtgtgtatatatatattattacatgcatggtattgaccattggtgaacgtgcatgaattaagactacacggtcagtacatgcaaattgtagtagtagaaatgtatcaaatcatcaaaaaagctgcatacattgcgtaattaactgggtttaatttgttgaattttccgatcgatcgatgtgtcttcaacacatcaaatcaatgcagaatttcaaaaggaggatgcatggccagaagaaagaacaagatgatgagctcatcatcgaagtagtatatatgctttgatagctccaggtaagacattgtacgtatggcgccgtcgctgtcacacaaacaaaaggagaagagaaaaataaaaatttataagaaagaacacaagtctctttcgcgccactaagaaggcaaccattttttagggtttttttttttctaaaagatcgatcgagatgtcgaacacgaaaataaaacacacgtatatatcaatcggcatcgagtaatgaatttgctggcatcgatggatcggtcgatgttaattcagatttcagagtgagagtagtaggcagcatgtcaccatgcacatgcatccatccatcgatatatctatctacctagccattgggcccggttaattgcaaattaaggtgcgacgacgagaacgagtttatactacaagcaggctcctggttcaaaatttcagttctatcggacctcccctccacccccaacccccatattatattattttggtcaaaattttcaattttttaatttattgaatttggtaacattttgtttaagtttgacttttttttgaaaattcaaaaaaaattggatcgacgtttcaaaaattttggtatatcggcgtcgctgatagaaatgccgaaaatgaaatattgaaccagagcatgctagagttcagaaacactggttatgtagatatttttcaatcatagatagagctttaattagctgtatgattttatcatgattgtaataaatgcatggttttaaatctctaactatagataccgctatcttcggttatagctatttgaatagagatatagttatttgttcttgcatacaatttaaccgctatagctgctgctataactgtttgagaagaccaactgttaaataccttagcccgtcttttaaaacactgaataaatgtaatatatgtctgtctatatggtggtatttctttttctatcttatcgatggtctgttatgagttggctgaagttatctggacacatattgaaacaagtggctatagtctttttaagcaaatcaaataatatatattgttattaattatgttaaataaatctagctaggccatatgtgcatgcatcatcagagattcagaaacaatatttccttcgcctaattaataattagtcgtactctatataacttataagctgtactttttaatgaaaagatatcttgaatccatgcatgcataatgaagcatgttcaatttactaatccttacgattttacaatccaatcatcatgctgtcgaattcccaagaatcagcgatatagcgtatctcgtgaaagtgatatcgggggctccatttcttcgccttgttttgtccatttcttcctcctctgctgctggcatgcacgcttctcctttattttttttccatgcatatgatctcatgaacagggccatcttgtttgattcttccctttaaaactacaaaatgctttctccttttcatctttttgagttgacatattgtctaacctatagctacttttaataaacaaacaaattaacaccttctagaatgatgagttttttaactttaaagacagaaattaatcatgttctacacatatatagtactatatatatcacctgcttaattagtaactgatttaatcctgagtatatatacatgtggcagctgaggaaaagaagtaattaaataaattagcaacgaacctagctagtcggctagctctaggtaggtatatagggcgtatttttggatattttcttggcatgagccggctaggtttgctgctgtgtttgaatgaagaaaataggtctcgtcgaaatcagagtagggcccacccgtcggtactgcctccaaaaggccaagcaaaacttcaaacacgtcgtcatgcatgcatggagattaattatttgcaaggattaattttattaactcgatcgactgcagtatattgcatcatttcaaatgcataactaaaataatactccctccattttttaaatattttattgagaaacacaggacaaacataaatacataatcactcataagtcataacgcgcgcatacttataccctcattctttttatatgatgttggtttgttcaatagtactctctccgtttcaggttaattataagacgttttaattttaattaaagtcaaactatttcaagtttgactaagtttataaataaatatagtaatatttataatattaaattagtttcatcaaatcaataattaaatatattttcataataaatttgtaatgggttaaaaatgttactatttttttttataaatttggtcaatcataaaacagtttaattttaaccaaagtcaaaacatcttataacatgaaacggatgtagtataaaaaaacagattatatgatcgattgttttagactatgtgattagctgcaaaataattaatccacatcgactcgcgcaaatcaaacgcatgcatgggtcgatgaatgcagcaatgcagcatagtgctaagtgctaactacagttcgatcgatccagtcacgatgctgtgatggatatatgattgaaattattagttttcgatcgatgatcgatgcagcgagagccgtacggcctaactgatcgtgctgctcatgaatgaaaatgcattatgcagatgggagtcatggagagaggtatgggctccaaggaggatctgtcgagaggtcgatcgatcgccggcatgcagcttgattgatctgcaaaacattttctatctacccttggattcatgcatgcgtgatactatgatttaattcattacctcagctcaatatgatgcataaatataaccgttgttatactatggttgagttaaatttcagcaaaatagagagaaaaattcgaccaacttgtaataagtcattaggtggaacaattgttatacattatttttttttcttgtttttaagtagttttcttgctttgtaattaatccatgattttataattcatagctatccgtcatacaaactctgcagtaattagatatagcttctttaaagtaaatatcgaaatgaattcgatgatcttaaaaaaataaacagagtggtgactaattaatgtattaggccggtaataataattcaaacaaattgtttatactagagatttaaaacaatctaacctttatatgtctaagcatgtagctggccaattttaaacaaattggtaaaactaaatttctgacatttagaaatcatcatatggttaaacaagggagcacacatatagatatatacagaacgcaaaccacatggacatgacaaagattttaattggatatattattcgttacttcgaatggaattttatctgaaagttcagcatcggatagaattaagcccaataacatttgggctcttaatgctggtgaatcctgcagcagatgtagaacagccagatgtgtgtcaagcctagttggtgggccagaattgcaatcaccgaggcccataaccacatacatataggccggtacttgtctcaggcccagcccaatctgtgaggctgcaatcattccattttggaaaaagtacaccggaggtccttcaacttgtcatcgagttacaaaatcgtcccccaaccgcaaaaccggatatatgaccacccttaactcacgaaaccgttcactttaggtccttgggtggttttgaccccgggtttgtccgacgtggcagctgaatcagcgtgggacccatgtgggtcccacatgtcaggaggccacatcatcagtcatcaccctctctcctctttctttcccctcatctcgcccttcatcggttcctcctctttctcactcttctcagcggcggcgccggctgcgaggtaggaggaaggaggacgtcgacgtcggcggcggcaagacgcgggagaaggggagggcgtcgacgccgcgcgagtgaggtcgaggatggagaccacggcggcgaggtgagcgacctcacggcatcgtgcaagcacggcagtggcccggtggagttccgcggctgccaaagatgggcccgacgggtgtgcagtggtcgtgcatcagctgtcgtgggtgggcgctgggtggcggagctcgaggaaggcgagggtgccgctgccaccgcttcgtcacccgccgccgtatcgccgggcgccagatgtcctctcccacctcgcagccgccgccgtgtcgtcgggtgccggatgtcctctcccgattcgtagccgccaccgcgtcgccgggccccggatctcctctcccgcctcgcagccgttgccgccgccgcctcgtcgcccggcgccgcgtcgcccaccgccggatctcctttcccacctaggcacggcgacctcctcccctcccaccggccaccgtgcagagagaagcaaagtgacagagagaggggatgaagggagaggagggaaagagatggtgatgatgtggcatattgacatgtgggacctatgtgggtcccacgctgactcagccgccacgtcggacaaacctgggtccaaaaccaccgaaggacctaaagtaaacggtttcgtgagttaagggatatcctatatccggttttgtggttgggggatgattttgtaactcgatgataagttgagggacctctggtgtactttttccttccatttttacctcattgctgtcaaactgctatcaatgctaatcaacatagtacaagattgcaatatttcattttttttttcacctacaagcaagcattaactcaagggactgtccaccagttgatagaaaccctttagaaatcatgtaaattttaaaccattcgattactttaagattcatacaaatcaatcaaaccctaaaacccatttgttcctctctctctccgccccccttctcccaactcccccacacgctgccaatgctatcacaggcgtctaatcgcgatctgcaccatctccaccaccttcgccccagcgtgccaaggtctggctggccgaaatgtgtcaatgactctggcaaggcctcccaatcttgccttctttcactccctctcctctcttttttctcaagccagcggggtgagttgcccccgctcagctagatccaccaccactgaccgtcgcttctaaccattccttctgctttgtctcctgcagccaacactagcccgtcgcatgcttatgatcccgtggcttcggcggcgccgcggctgcctcgctgctcaccacgggttaccctcccatgtccgttcctctaaagccgacgacatccccccttccccctccctccaccccaatgaccctaatccgtaggtccctagtgaggcttggggttggaaaagatgaggaggttgtttgagctgaaggagaagggtggtaacaggaatcacaaaagcacatccgatgatacaaaatctacaacatttggaagtccattttctatcaatgaaggttagcagtttcgttaattcaagttatcgacaaacagggtgcacgattgcaaacaagaaccgtcagccataatctcaaaggaacaaagcggctattaattacactgaattgaacacatgaaacgccacattcatcgatcgaaaatgcaaatacgtacaagatgacacactccatttaattaacacaaactaacagtttgaacttgaacaaacactgatcctaaattatcgacagcaacgacactgcttgaacaaccctgaattaagcaagttaattcgagcaatcattaatcctaaatgaaattacaatcctacagtagatattacgcgcttgatagtttatcaaagtgtcaaaccaagccggccatggccatcgcggcagccgacacgacgggagcgaagaacgacgccgcggcgaacgcggatcccgccgccgctccggtgtcgtagtccgtcgacggcgccggcgctgctgccggcggcacggcggcgaggacgttgatcatgagcctctggccctcgttgcagcggccgaggtcggggctggcgaagtaggcgaagccggggacctagaggtagaacaccctggcgccgtcgcccggcacgggggcgtcgccggcgtcgacgccggccgtctcgttgcagtggtagtaccccgccttgctcaccttgatcaccgagtcgttcctgtactcgaactctgccaccacacgccatggatgcgaatgcgaatgcaaaattaaagaagaggagatcgatgacgagttgacgacgatgagatgaaactgccgttgattcgttaccgatggagtcgccgacgtagaaggcgatggacgacgcccaccgggagtagtacaactcctcctcctccggcggcggggcgatccacccgtcggggccaccgacgcggtactgctcccctgccgccgccgccgccgcgccggcggcgaggacagccacgggaggagacggagacgagacgaagccgcgacagccgccatgcctgactgactgatgaaagcgccgatcgatggagcgattgccggagatcgaagaagaaagaagcggaaactgctcgtacgtgtgattgatggtgtgccgcggcgatcgacagaagtggcaagaatttataggcggaggcgcgcgatcgatcgatcgagccgttgagagggggagcgtcggcggcggttgcgtcaaaaagcctcgtcggcgccgcgcgcgcgggagggagtggagaacgtggccgtttgaactcggtcgtctccgcgcgctctgcagttgcatatgcgatgcgaacttgttcgtgtctgcaccgtgaagacgaggtttggaattcagcccatttgtttttcgtcaacaatttcggtccataggggtgtatgggcttgaattacggcccatacatgtggaccggtgggccggccctttaacgataatgggcctggagttgtctgttcattattaagctttggaataagttcactttaggtccctctatttcttcgtcagttcgattttcatcccttaaccgcaaaaccgggtataacccgtcccccaacttacgaaaaccgggcaaacgaggtcccctagcagtatggagcgtagttttaattgactgacgtggcacttgcatggctcctttgactgatattcgtcccacgtggcattgacatggcgtttacatggcaattttatccccacaaaataataaaaatcgtgggacccatatgtcagctacacacaaaataattcctctctctctcgcagccagagcaagcgatgggtggggccgagaggggcgggccgggccgcaaccggagtaggccggcaaagcggcggcgaccggagcaggcgaggggcaaggcggcgctccacgcactccctcttcttcatcatcgcgccgcggcgccgcctcacagccggcggagcggcggcggagcggagggccaggcggagtggcggggcggcggcatgccgcggccacgagacgagcttgtagatgacacggctccccgtacccatcgccacgaccgccgcggtggcgattgccatgtccatcctggcgctcctcccaaccccagcagcgctccccaccacctcccccgccgccgcgcacctcgccgccgcatcctccctagggtcaccctcctcgtccccaaccacaccgccacctcgatgcaccgcacgtgcgccacctgcatcacctccctctgcctcatggtagggaggagctccatcgccgccgccgccggcggtccgttcgtcagggatgcaggtatgggttgctccgctcccgccggtcgccgtcgcgtgcccctttggccaccgccacgacttctcccccgccggccggccgctccgcccctctgctccgcccacgacgcaccgctcctcctcttcttccccgccgccgctccggccgtcgaccggccgctgaccaccccacttcgcccattggctccacccctctgctctaccaccgctccgcccaacggcttcgccacgctgctccggccacccctctactccgcccaatggctttgccttgccgtcggccgcccgcctcgctgctccggccgccaactggccgcttcgcgccatgacacggcgccgctctgaccgccgaccatccctatgctccaccccaccgtcgcccgctccggccgccacccaccacgctccgccggcttgagagagaggagggagagagaggatagagggagaggagatagagagaagaggtagtgatgatgacgtgtgggtccacatgggcccatcattttttattatttgtgtgtgaaactgacatgtgggtcccacaagttttattattttatcggatctaattaccacgtaagcgtcacgtcaacaacacgttagacaaaaacctagtcaaaatgagtcacataggtgctacctcagccaaaaccagatataatactgttgaggggcccatttaaactgttccgtaagttgggggacccgtcgtatccggttttgtgactaaacgaaaatcggacaggggcgacaaatggagggccccaaagtgaacttattccttaagctttttaatggacctctgttaagacccacaagtttatgtgggcctggtaattatctggcggcccatccagaattccagacaaggctagtcaactcggcaagggtttcctcgccgttgccgtcgccgtcgccgtcgccgctgccgcttccgcttgcgtgccctcgtcgccgtcgaatcgctcgcccgtcggtcgggtccggtgacctcgctgcctccgagatcctcctctcctcgcctgcgcgctcttcccgtcggctagaagggctgcttcttccgtcccggctccgtcgccatccccccgccggcggcgacttgggcggcctcggctacttcgcccttgttttccggccaagttgaaggttccggttccgtttccgatcctcaggtaaaagagcacatacttctccaatcatttgaatagctaacagcaatccattgtgcatttgtgcttcatgcggctacggatgtatccatcaattagttgagagataggatcgattcactgtgtgttctactgatgtgtaaatgccgctatgttctgcatcatctgtgctgtgggatttgctatttctgttactttgatgcggccgcggtaatgtataggagtaggaaggatttattggcatttcaccaatcgtccttagttaggtagctgatgcgacgctgaagttggctgcactgcctcaacagtataactgagggcctttccttgaatcattcgtgtgacttctttcacattcctctgttgtttggaggaataccaagggggatgggctcatctgtagagtattttttaaaatatagacagtagcatgtgttctggatcataaactatgcgaaattgcgagccaaaattttgatgcaaggttgctttgttacaaatatgatctgtatttccttgatttaaaattaagttgttgtgtaatttgttcaactacaaagaatgtaaaatcttgggactcggattgttggcctgtatttcacgcataaaactacaaatattgttatgcttttgtttaactcctcaggggttttgcagccagcactcgaattttcatcattgttttaggcatttgatattcttatcagttcatcattctaaaattaatctactcggattctaatagattttgagaaaatggatcctgaagatcttactgactctgaggaagatgaagatgatgacatgatgttttttatcttgcctacactatatcttgtttctactggaagcgaagagccatgtcatacatcgaagttcagtggtgcagagtggatttgtgaagtgcttgaagatgaccgtggtgaaggctatgccaaatttcgaatggagcctcaaattcttcagaaattttcagaccttcttaggtcaaagaatcttttgcggaatacaagaggcgtttctgtggaagagcaaattggcatgtttatttatatgctctctcgaaatgccagctttcagaaaatgagtgatagatttgagcacagtagggagactatccatagacatatcaaggcatgctttgatgcaatcacctcattgacagatgagtttgtcaagcatccttcaactgagactcattggaaaatatcatctgatccgcaatatgggccttattttaaggtaggtttaacctgtctctttgcattgtatgaagttctacacttctctgctacatctgaatcagtagtgtgtttccttgcagaactgtataggggcaatcgatggagttcatgtacctatcacaatatcagactatgaagcagctccatatcgaaatatagaagattccctttctcaaaatgtgatgctggcttgtgactttgatttgaattttgtccatgtgtgcagtggccacgaagggtctgcatccgacgcggcagtcctatatgctgctgtggagtctggatttgaagtcccaagtaacaagtattatttggttgataggggttatgcaaacacaccatcttttcttgctccttatagagaagctgcataccatattgaagaggaggagcagagcaattgtcagccaagtgactacaaggagttgttcaaccttcgtcactcaaagctgcgcaacaacataaagcgtgccacagcgctattgaagatgaggttcccaattttaaatgtcgcaacattctatcagatagaaactcaagcgaaaatcccagcagcagcagtggtgctgcacaatataatgcagggccaaaaagatgatgatgatgatgatgggtgggcatttaaccaggcaatgccagtttcatcccgtagaactgtagttttacccagtggggatgatgcttatggcaatgatgtcgaagaactgaacaaccaatgtagcatgggtgatgctttgagagattatattgcgaagaagatgtggacagattatgaaaggaacaggaggtaggtttccctattctgaggccaaacaacatataggtgaaaggaaagagctgctcatgtgtgatttgtatcttgaattctgatgtttatggttaaagatggaactaggcaatgccctgtagaagctgtactcagttgacacccaccagtaagatatggcattttcatgtcctccatttggctatcaatctgtgtggatgttgtggttgccaagatagtgccttgctagcaaacatggcgtggcatttaactaccgccacgccagtataaatggcgtaacaaaagaggaattgcctatgcatccgtcgggtgatttttgagaaaaattatctccctttagatttgcatcttacggactaaaaaaataccaactagaaatttcaattgtcaacaatcaacaaatactataaaatttccaactaataaaatgcttaacacgctcaggcacagcttccagattacacccgaatttaccgtacgtaacctaatttaccccaaaatcacacgaatttaccctcggggactcaaaggtggagctgaagtctagctaaacagtttcagctctatttaaaatgagtgtggagctgcttggagtgtgttctcacaaaatgaattagagaaaatgaactacagaggtggagctgggtttaggctgctctacaactccactctaaacccaattcctaaagttaaatttatgagttggagctctaccaaatatgtctatctttcctaagtaagatagaatatgcgatactatttttatatttttctttattcctgtgacgtgaaggctttactagtagtagtactttgaaaacagatcaagctgcatcccggcaacaaatcattgaactatacaagaatttttattacatgataggaattgctgcttgaaatgcatcagtaaataacagtgtgcaaatgtatcgtgttgtagcagcaaaaacatctgtagcttactgctgtagtgatcaagaaacttcggaagataaattcggcagtgctgcagacaccaatttattacctaacgttcatgcttcattcctcagtgttccacttctattgacaccattttattacctaacgtcaaatgctcgtggcgaaaaatgcttcctttattgacattacctcactatatacatcatgtatcaatggccgatcttttggcgactcttcagagcattccaggccaagtttaaggagttgtagagcacagatatccattatacctgtcttgtgttcatgcaattgcagggtatgattagaaggttgttctgtcatttcaggaataagcctggggtcaagtatgtctttgatctgtgaaagtgatgcattgacatacatgcggagtgtgaagccatcagtaaatatttcattggtagggtgtcttcctgttagcatttccagaagaataatgccataactatagacatcaccctcagttgagatttgactgcccatgccatactctgcaatgttttgaaaccaaaaagctcagatcaccagtaaaatgaaccatattgttaatcataaaatactgaagtcctttttattaaatgatactctgctttgtttgaaaacaaaagattcagataaccagcaaaatataggagtaccatattataatcataagagatttttttagataatgggaatttttaaaccccgcttctacagcaacgggggtgtataatcataagagatataatcgtaatttcgttatattaaataaatgattttctgcagtgtgctctgaaaagtgaaaaccaactcaccaggagcaatgtacccaatagacccccttggcccagccatgcttcttgatatgctttgagttccggatgaatattcacgaattgaccttgccagaccaaagtcacagacgcaggcaacatagtcatggttgaaaagtacattgcttggcttcaaatcgcagtgaacaacaggtggaatgcattggttgtgaaggtattctagagcagaagcaatatcaaatgctatgctaatcctttctcccaaactcaaatcaccacatggatcaaaccttgtgtgtagtcggctttctaggctaccattagccatatattcaaatactagagccttgaactcactgcccatcggatcataagttgagcatgcagttatcaccttgacaagatttcggtgacggatgttcttcaatgctttgcactctgccataaagctatccaatgcaccacactgatcgagcttgaacaccttaacagcgaccatagtgtcttctgtatccagtatacctctatagactgtcccaaaatgcccagagccgactatgttggctgcagaaaaattatttgttgctttgctaacatcactgtatgttaactttttcagctccatgtaggagtgatctatgtgctcattggatttccccttccttttcaggaaaacatttacgatcaacaaatataatccgaggattgaagaaagtaagacaatagatgaaaaaactgccaacattggaataacgagcttatgctttcttttggatgctgaagcagagcagacagtcaactcgtccattggaacattggtgcaaaggtgtggatttccttggacaaacaccttatctctgtcagaaaatattccaccaactggaattggcccctcaaagttgttgtatgacatatttagatactgtaatgaggtgaaagtcccaaagaaatccggtattgcaccagataaattgttcgcggagaaatccagcactttggtgcctctgaggtttgctaatgattgtggaatacttccctctaggaggttgcctgctacacgaagtgattccaatcggacgcaagaaccaagtgtagatgggatcctgcctgtgagtctgttgtgggaaatgttcaaagaagcaagatttatcaggctaccaaattttagtggtatggagcttatgaattggttgtgtgataaatcaagtagccaactcaattgatttagcttgacaaacatgtctccgcttatgcttccagtaagggcattacttgaaaggttcaatgccaacaattgttggcacctcgctaaagttgtaggtattcttccactcagttgattttctgataaataaagttcagccaattgattcaagttaccaatggattgtggtatttctcctgaaaatttgttttgtgaaaggctaaggacaacaagattgtttagttggccaagagtatgaggtatgctccctgtcaatagattgttatcaagatagagtagggacatgctagataggttcccaatctccaagggaatggtgccagatatatagtttgacgggagagcgagtgaagttaatgttttcggcaggtcggctacagagctgggcatgtccccacgtaggttattttcaccaaagtgcagtttcagcagattggagcaatttttcaaggatgataggaatgcccagtctccagcttctaactggtttgagtacagcatgacaacctgcaaatctgtcatcaaactaaaagaaggaatcacccctctcaaagagttgttggccaggtacagaaactgcatgttggaagcattagctagagatttagggatttctccaacaaaatggttgttagacatcatgagaacttggatgttaggaagtgtgtttcctatgtcaggaggcatcatcccctcaagattgttgttggccaaaccgagaaaactgatggacgacatgttgtaaatggagggatttacagccccagaaagattgttgtaagagaggtcaagatattgtagcgccgacagcttactaaaatccggtatacttccctgcaactggttttgtgcagctaaaaatgctgtaagcgatgagagattcgctagagatggtggtatgcctcctgacaggctatttgttgtaagatcaaggttggtgatccgtgaagtgaacatcgttacgggtggaattgcaccagaaagattgtttttcctaaggtatatctccctgatggttgagctgttgaaaagtgctgcagggatgctcccgtagaggctattgttcttcagtgaaagatagcggagtgacgacgcattagccaagaacaatgggatctctccggtcaggtagttgtccgcgaggccgacagactccaacgccgatgagctcccaagcaatggtgggattctgccatggaggttgttgctggttaggtccagggatgagaggttaggaagcgtaccgaggcctcgtgggatctcaccactgatcgcgttgaagctgaggttgaggtactggagcctggccacatcggctgtgaatgtgaggccacctgagaggccattgttggggaggtggattctcgcgagggacgagaggttggagatgcagggtgggatctctccggtgaggcctcctgcctccatgtccagggccacaaccacacgaggtcgttcttggagcttgatggagcaagtgacgccgcgccaggtgcagaaatcgggtgagatggtgttgctccatgtggagaaggcggacccgtttgggcttgaaagatgtgatttcaggcaaagcagtgcttcccgttcatcagctaatgctgtcagggtggagaagaagaggattgcagcgactgcaaccagagctgcacatgccatcttgcttaatttgctggtgtgtattttggacagtatgctggtggtaagttatgagatgcttgtgattcttaattatagtggactaggatgcgtcaagatcttctacccattaaaaccatatattggccacatctttgacccatgttgattgttggatggtgccatattcttagtcaaatagtgaatgcattaattcctgttgaacatgattaggttgcgtgcatggacttaattacggagatcttgttgaattaagctttgactagattgttttattatgcaaactttcagaccttatttttcagcaaaataagtaatggtaccttattagttagttataccaactgacaatttgcctgcctacgtacattttccaacatccgtctgacggtattttgcgacgcggtgtagaccagttctgaacttctgatggttcatttgaaaagcatgatctttttccaatttcacctaacaatccacaaagtaaactgtgctatcaaacctcttacatattttgtgcattagacaaacacttttgtcctatggtgccctgttgtcaggaaaaaggaatatcaatgctttataaaactaattggaggaacatgatggatattaattttaaacgtatttgttattttctttggcagatcactaatctatatttgtagagcttatatcgttattactttggattatgtcatcgaacatgtcaatcatgggaaaattgtcactgtccacaggtatgaaatagttgaaacttcaagaatagaaaagtaagaacaaatttacgtggtaatttcctcgacaatggaagtccattccattacattagtcaacacatgatctgcctcaaagtcgtatgaaattgataagtctggaaatttcaccttatcctttcgataccaatgatgtatctttgacatttgtgactggtttaggcccagtcactgctcattggtcgttgataagaaaacatcatataaaaacttctaaaatttataaataattagttataagttcaaatgcagtggctctacattcgttagactcataattttatgatcttaattactctgaattaaatgtagaacatatagtactactccctcagtcccattttaagtgcagttatgggtttctgttttcaacgtttgattgttcgtcttatttgaaaaatttatgagaaagttaaaaaaagtcgcagataaagtattattcatgttttatcatctaataacaataagattgctaatcataaaaaaattcaaataagacagacggccaaatattggacacagaaaccaaaaaaatacacttaaaatgagacggatggagtagagttaaaacttctaaaatatagtatagctagtaaatactacaattggtcacataacttgtaaaattcatactagctctaaaaatggaaaactcaacggggttgaatttcatagaacacactctttattgctgtaacccaaatctttatagaacttagatataaactatacttagaattatttaacttaaataaagtataactaacatagagcttggtaaattcataactcacaaatgctaagtgataaaatagaattattgcttaggttagaattgttgcttaggtttgagtgatgtgggaatagttgatcttcaggatggttctactaggggcctacccctagtcggtttgctgtgtgctaaggtagataggcttttcactgaacctttatctagttgtttctaagaccatgtttggaaccagggactagagtttagtccctgtcatatcgaatgtttggacactaattagaagtattaaacgtacactgaactacattggacatatagccgattgctcaaaaccctagcgacatcggctggaattaccccattagcttgtcagccgattggctctttgatctgctatttatatatcttgtcagttacaagatcgtactgactggcacgctagcatatcatctattttaggacctgtattggagttaagcggatctcccaggccttcgtgtttttgtcgacttagttcgcgttaacgcagatttggcactatcgaccgagcgcggatttttttatcaacactaccttgtcatatttggtgattaaagaatggaacggctttgattcaagttactcctgacaagtaatttgttttttttctttttgctgataaggaacgtaactttaatttttttccttaattgattctctcggatcgctcaatgtgtacgacttctcaccatgacattgattgtacatttttctaattctacttgtcataaggcttatgtggagctcatggtagaaaataagaatggcgtacttgtataacatacattgtaaagtcaaaaatcggattcaagaagatagctagttataaaactatgatcaagatatgcatgtgtgtggaaatgtgaaagtgaaatgataacccctttgtatgatcctcctccttgcacttatttagtgaacatggctatttttctcccttttttttttctttttttcatgctcgagaatattttgtctctttttctttgtgagcatttctctttttctcatcaacatttttttttggctcatgtctcattttgtatgaatagttagaggtaggattgtaagcgtatgaagtctttatttggtggatggatgactgatgctgattttcagtgtagaagtatcacatatggtagatgcatgcatgacatatttttgctaacctctagtgtagagggtgagaaaatatagtgggtatcagtgttaaggataaaacactgaatatagtaggtatcttctatagttgggtttgtactatacggaagtaccatatacctaattatacatgggaatgtatcttttgattaagagaatacgataaatccaaaaagaaattgtcttctcgggatagaaagtgtcaggaacccaaccgagaatgctcatgttacattctcaccccaaacgtggagcgttggggaccgcatctagatttgagagatattttgcagtgcgccacctcccaaaggcatagcggtggcgcctacttggcgcgtgtgtgcctccagcgcgcgtttcggacgagaaggtatagttagctaatcaattagttttagataattacaatttgaaataatgacggtagtagttaagattttttttcatgagatttttctaactaacaaattgaaaagaaatctatacctgaagtcaaattttcaaaattttaaatctagatttgaaatttttaactcgaaatttaaattttttaagtcaaattttgaaaactttcaacttttcatcttaaatttgaaaacctttcaactcaacttcgaaaactttcaacccagatttgaaaactttcaaatctagatttgaaaaaattcaagtcaagtcaagatttgaaaactttcaagtcagatttagaaacttttaactacagatttgaaactttcaactcagatttaaaaactttcatctgaaaattcaaaacatttaacttaaatttaaaaactttcatctcaaagttcaaaaattcaactcaaatcttaaaaattttcaactcaaatttgaaactttcaactaaaattgaagatgaaagattcaacttctaaaataaaaaaatcacaaaaaaaatgcaaaaagaaacgaaaaaacacagacggtagcttttccaggaaaaaagttacggacgtagacgctacgcgtgagccttatgggcctaaaaacgcgcgcgcccgaattagctctcgtggcggaagttctgcatcgcggtatttgaacggcggcctgaagccgcgtcctcatgcttcgccgggattgcgtcgcctggtggtattcttgattttctcaagtttggccgtgctatatgtgatgtcaggaaggatgccatcaagctcttgctgttgctcgctgtgttaatttgattctttgggcaagctgagagcctgagaatggacttcaacggttgttcggtggaaaggcatgtgtcaaaacccaaaaccgaatcagggagcttgtcaatagggtggtggacggttccgtggagatatttgaggaattgctcgtgcaggtagagctgcagtgcaatatgcatgcatagctgcacatgacttttttttctttttcttccgcggggaagctgcacatgacacatctggctggtgtgtattttagacaatatggttgtggacgcagtgtgacgtcagcgttcgatttacgtgcaaaactattttaaactgatttttcttctaaattacttatccaaatcctgatctaattgcaccattaatttcattacaattaaacttcaaaacaagaccacacgtggatatattccgacgaaaaaaatagcttattattgaattatttttaaatattgcacgatgttccaccaggtatatcggaattgtttcagtaagtagatcgaaaatgtttcactcgtttaaatcagatgttgtttcaccttatataaaaacaatgtttcagaaaatagcgaaagaatgttttagttcactgcaacattaaatctatacatagtgaaacattgtgagtacactatgtgaaacatttttcggtggaataaaaaataaatcaaattcccttaatagggggtttccaaaatacgtggtttttttttttttgttgcaatggaatgtttcgttcactacaacattagatttatacatagtgaaacattatgagtactctaggtgaaacatttttttgtggaacaaaaaataaaccaaattcccttaataaagagttttcaaaatatgtgggttttttttgcaaaagaatattttaattcactgtagatctataaatagtgaaacattgtaagtatactagttgaaacatcttttgtggaaaaaaaggggagggagaagtaggtgggtccagcagatacgcatgtagggggaggggagcgcccgatccggctccccccgcgccggtcgctcagagtagagcattatcgtatggttgtaagttgagacaatcgtttatttgacaatatttcaaaacctaactagtaatctagactttttttttttttgcttatttgaccctgcttttcacaatgaacacctgtctgactctgctttcattgcaccgttaaagtttcattaaaaaaagaaaaaatatataattacttttcataatgaccaaaataccctcgaaaaacccaatccacatataaccatgtcccttcagatcccctctctctctcttgtatcccgtctctctctcggcgagtggtggtggcgacacactgaggggataaagcggcggtgttggctcgtcgagggagggagcggcgggctatggagggaggggatccgcaccagcaccggctcgcgaagggagggcggcgcggagaagcggcgctggctcgtggaggcaggtagcagcagcgtcggggcgcggagggagagagcgccgccgtagagggaggtgcacgacgcacggaggggataagcggtgatgtgcctgcatgtggagggagggcacgactgtggcgccggtccgtggagtgaggagcggcgatggtgccggcgcggggagggaggcgcgggtggtggtgcgcttgcgtgtggagggaggagggggcagtggcgcgtggagggaggtgcgggcggcggtgtgccggcgcgtggagggaggaggcagcagagcgccatcacgcggagggaggcgctggcagcgttggtgccagtgcacgggggagtggcaactgttgcgtgtggcatcggcgactactgttatggcacttgccgtgaatttgttgtttggttatcatctctgttggatttgactataatttgtgtttctacatcattgtatgcaatttgcacggctgcacaaccaatctttaccactggttggcaaccatctgttgtcccagttatacaaccggaacggtgaattcggaataaatatcgctatctttagtcccggttcaatcgatctttagtcccggttggtgtgatgtggtcccggctagagggttttttccttcttttttttcttctctctctttttcactgttcttttgctatttgcccaaatcatctcagatcaaacattcatcattcacggtaatatagttcatcccaaatcattcacaacaacacatattgaatcacacggtaaggacaaaagaaaaaaaaatccaaaagcagcgccggcctccaccgcctaccgctgcactagccttcgcaccggccgcctcccccttcggatccggcggtggccggctgcctcccctcccagatgcgcagccgcccggccgccgcggtgcgaggccgccgccgccgctgccgcctaggggaggaagagaatgaggagaggaggaggaagaggaagagatggggtgaagaggaggaagagataaggtgagggtggaggagatagaacttattaactgatccgtctcctcctcctcgatctcacgcatgcctcagcctctccgccgcgcatgccaatctttttttccggttggtgtaactaaccgggactagaaatatatctttagtcccggttggtaacaccaaccaggactaaagataatagagaggtctgacattgcatgttgttcttttaaccaggactaaaaatgatctttagtcccggttggtataaaaaagtagctctaatctttcgaaccgagactaaagataatctttaatcccgatttttattgcaactgggactattgtggtttttgctcgaccgagtaaagatggtttctccagtagtgttgggatccacaaaataagacaatatgctgtcaaaattttgttaaaaattctgccaaattttatttgccttattttgtcaaaaatccgtcaaatttaagtcaaatttgttaaattgattcaaaattttcaaatttataaattgaagccaaatctgtcaaacttatctctaatctggtagatatacagaattcgttacaaatatgtcaaaagatccaaatatatgcacgttttgatgtaacagggtcaaataagtagagcaaaaggggccatttgccctttagttaacaccgttaactcgctttaacggaattgggtaagcattcatcttcaattttgaaaagcatggttaaataagcgaactaaaaaaagtatagtcatattaataagttaagcttcgaaataggataaaatgagcaattgccccttttaagttttgagatgcttttgattcttatagtggactaggacatttcataggcttttagtcaatatgattttaagatggcgtagctgcagatgacattttctacccatgctgattgtttgatggtgccagattcttaggtcttgtttagttgggaaaaaattttagggttagttgtcacatcgaatatacggacacacatttgaagtattaaacttagtctaataacaaaataaattatagattccgccagaaaactacgagacgaatttattaagcctaattaatctatcattagcaaatatttactgtaacaccacattgtcaaatcatggcgcaggcttaaaagattcgtctcgcaatttacacgcatactgtataattggtttttttttcatatttaatactttatacatgtgttaaaatattcgatgtgatgggtgaaaagtttttgttcgggaaactaaacagccccttagtcgaatagtcaatgtattcctgttgaacatgactagattccgtgtatggacttaattacggagatcgtgttgaattaagctggaataggttgactattgtttcgataatgcaaactacattaagaccttatttttccgcaaaatgataagtccttgttagtaaaatcaatggagagaacttccggcggtctgactggacctgtacgggcagtctaaccgggcttagaaaccatgacgtggagcaggaaaccaccgagttgtgcgaatggaagtccattgcattagttaacactctcttaataaattaaatattatgaaaataataatttagaaaaagtggtataaacaatgaaatcaaagaaacatttttgagaaaacatttatttttaaagatatccacaacaataattcgatatataactagctgaatggaaggtgtgctgagcggctcaatagtcaattctcagttgtaccggaacgctttaaactttcgaagaaacttcgtatgtattttaacttgtccacagggcgttgaacagattgggaagatcgcgaagaaaaaacatcacatcatacatggaaggtcgatggcttttgaaaaatttgttcggtgatgacttgacgttttcttagttcgcaccctttatattgaacggaaactagcaggatatgtagaacaacgaagaaagaagattaaggctctgtgtttagctatcggtgaaagcggagagatattcatttctgcccctatttgatcatggcttttagataccgcctgtttcttatattcgtgacggtggagatcgttgtgcttattgtccgaagcacagcatcagattttcggtcaggttcatcaggtgagtacaatatgagtcgcccttcacaccttatatatatactatatattagacggttctgtaaaatcgtcacagtttttttttttttactctgcgctctccagggatagccggatagaactatctgagatgaaatcatctcggacgggttttgttcaaggatattaaacttttgagtaagtactctgcagtgttttcttaataatcgtgtaaaaacaaaaaccatcttgagtactctctatctctctctctctctctgtcgtaaaacaacttactttagagttaaactttgtgttaatagattgatttttatcttcttacctacatccggtgcataaatatctttttttttatctcttcactatctccgtattctagcttgtattttgctttaaatttagaaccgggtattgatggtgccggataacgtattacacataatgtatcctatctaatattatttacttaatttatatctctaatacatactaatattaaatatagagagacaattatagtgttaaaaaatagatacattaatgaaaaaattatacaatattgtatctaaggtcgtaatataatgattaaccaatcttttatcaaatatggatgtacaatatattttcatatatgtttcataatatgagacatacggccagatacaagtttttcggtatccaaactatatttttttatgcgtctagatttgaaattggatagtatcggttatcctgttttctctcctatattcttaccgcaagcctcaagtcgagtgggtggtcaggaaatacctgttccattatcactcataatttagagggaacacatatatttgtaggcttatatggcatgatgccttccgcgttttgatagggaattctaatcgattaatcgtacgtaattttttttaaaaaaagtaaagataaaatgattcttatttaatctcttagcactattactatttgtaagtacttaatcccattccaagcatgctatatattacagatcagtgggaggttggcagagggagttcctgttttcaataatgtatatttttcactgttttcaaacaaacatcagaagttatataaaattagaaagacatatagaatagaagcaccgaagaactgtactgacctttcaaaataagacttcatgtaattttaggtcatttcctttagttcttttccttttttttttcttcaaatgggaggattttattttcagttatagttttttggcaaggattttaagttatttttattttattttggcagtcatgtttagacgcattatcttaaatctgtggtaatgtcttttctctttatactagtgaattaagtcgcaccttggtgcgactatgaccattctaatatgaatggtatgtgaaaagaatattaatgatattatacattagatttgaaatcactgtttattgtcccaactcatagatacttatttcacttctaaagatatttcttttccgtatttatgtttgattttaattgttgtcatataatatttttgtctaataggaatcataagctcaggtggtgtttcagctgaacctagagcttgctttcgtgcaactataatcttcctacctattaagtgttgttaaactagattaataccctgccgtgttgctgcggaaaattaagttgcataatatgtacaaataagatgtaatttgattatcaaaactaaaacaatttgatacaattttgagcctaaaaataattaagattgtatgtttttaagagagaagaaagaagaaacaatttggaccatagatctacaatccaaatgttataaataatttgggtgatatggcttaaagagagaagagagaaatatcattaactatacttagtggggattaactatataagtatatatataagtatatataggataacaattaacaataaatacccatctttcggctaaaacaaaatggtgagcgcatcgtataggcttaggatttatattcatcttctccatgccgtttcctccttccgattccccagacccttagcacctttattgttgccacttgagccgccgccttgccaccctattctctatctcaatgacatgtaggtccacatgtgtctatgacatatgggtccagtggcaaaaagttaattgccacatctaaatgtggcaaatggttaaatattcccttctttgttgcacaaccccttatcttcctattattttctacttatcctcctgcttttcacaaatataattttgttttacatacttaaattaatgttcagagaaagtattggcaaagaagtctaggtgcaacacaaatattttatcttgatctgtaataaacgtgtattgtcataaaaataaataatttactatgattatgctaagcttgtgatattatcgtaagaaccaaaattatagaatttcactattcccttggttcttgggtctatatttaagtaaaattgcacaacatggttgtaattataatcttgtaggctgtgtttgagaagttacttttgttctatatattgttttgaatattgctaactaatttaaacttttatatgtaaaataactttatcccctcaatgaacattatttgatggaataagttcatccaaggtcccttaacttgtcgacgaatccgattttcatccttcaaccagaaaaccagatacaacggatccctcaactgtcaaaaccggtgcaatataggtctcatggcgttttggacggcggttttagcttacgtggcgcctacgtggctaaattgacccggtcttcatctgacgtggcatagatgtggcattgacgtggcaatttgatttggaaattaataaaaaaagagtgaccccacatgtcagctacaccaaaagaattaattaaaaaatggtgggtcctacatgggcctcacttgtcattcactcccctcgtcttcttccgacacggccggccggtggcggcggagccagggatgacctcgaggacgaggacgccggggagctgtgcctggacggggacaccgacggtgagtgcctggacgtagacgatgaggaaggcgaagaggaggtcgatttgatttagaaattaataaaaaaagagtgaccccacatgtcagctacaccaaaataattaattaaaaaatggtgggtcctacatggaccccacttatcattcactcccctcatcttcttcctctctccctatctcccctctcctctctccaggcgccggcggttcggcgacacggccggccggcggcggcggagccagggatgacctcgaggacgaggatgccagggagctgcgcctggacggggacgctgacggtaagtgcctggacgtagacgatgaggaaggcgaagaggaggtctggacgtagacgatgaggaaggcgaagaggaggtcagcgtccccgtccaggcgcagctccccggcatcctcatcctcgaggtcatccctggctccgccgccgccggccggccgtgtcggaagaagatgaggggagtgaatgacaagtggggcccatgtaggacccatcattttttaattaattcttttagtgtagctgacatgtggggtcactctttttttattaatttccaaatcaaattgccacgtcaatgccacatctatgccacgtcagatgaagaccaggtcaatttagccacgtaggcgccacgtaagctaaaaccgccgtccaaaacgccatgggacctatattgcaccggttttgatagttgagggacccgttgtatctggttttttggttgaaggatgaaaatcggattcgtcgacaagttaagggaccttggatgaacttattacttatttgattggtcatatggtccaaaggaccatttggtctgttcgaccaaaccagcccattaggcctatttgagagactaatgtgaggcaaccacttcatcaaagagtgttctcagccttttcctactcccgtaattttgataaattgaccctttgaaaaagcttattttgatattgagccgtgtcaaaaactaattttaaaaataggctgttttctcgcgccatcgtacttggcgctgagctacaacgtattagcgccactttctttggtgctgagatgcggtccgacgtgtcacgtaaatcacacgtcatgcgatgtcagagccaaagaacctccatggtctagtttgtataaatagtatgcatgtacgttcttaccgtacggtatgtctatcctggtggtgaagggctgcctctcaaaactacaggtcaaggaatcgaaccctgtagcttcttatttttctttttttttccttttaggatctacataattatgtagcaaaatagagggtgaaaaaaaactgaaagatgtaaatttataccaactattaagctataaataccacatacataattttgttccttccatatttaaaaataaaataaatttaaaaaactaagctataaatactgcatacataattttgttccttccatatttaaaaataaaataaatttaaaaaacatccatatttaaaaataaaatgaatttgaaaaacatgtgagatttttaaatagaacagcaaaagatgcttgtacttatatgggaaaactttagtgactgagaatcgaacccattacctcacagtatttagcacccagagttctccaccaagctatcttctctttaagtgcaaaggaagcttgtagatagctaatatttgtaaattgaacagagatcagcgcaaaatactttggcgctgccctcggatgacgtgtaaaatccgcgacacctgtgatgacatctcagcgccaatgatagtggcgccgaaatgttatatctcagcgccaatctctatggcgctgagaaaacagcctatttttgtaattcgtttttggcatgattcaattttgaaataagttttttaaaagggtcaaattgtcaaaattacggtactcattgtatattttaccccttttagaagacgtactcctcattttgatggctagaattcttgtttggtattttgtcattttgtgaatccaactgccattatttgatagatgacatgactcattttggttgcttattgagtttcaattttcacttaggtagatgtgtaaattactttcccaatttaattaatatatatagtccagtactactagtagcctctcctaatgtttttcatcaaaaaatattctaaaaattgaatagttattatatttttaatcatgcttacagccaattctcgattcattttttatacggaattcataacttctgcttctatttatcgctagtcattttcaccgacatgtaaacgattcttgcagggtcaagtccgatatgcaacgcatgtccatgctgcccatgcaaatgctgatcattaccatgtcgtcgttgttctcttcgtaaccgcattgatcaaattcaattgttttgatgttttgtatttcctcatcaggttctattttgtaatataccaattcagaagcacatacatgtagtacaattcaacacatcaatcaatggcttaccatcagctgataacaaccaaaaccgtacccttttttttctcttttttttaaaatttttttaggctcttcaagttatcccttctttctataaagttaaggccaaaagctcaaaccttgtgctttcacgtcatcatcaaattgtgaaccgttggatgaatgtattagattgcttctcagacgttggatggaatgcagtatagagcccaacccatcagtcaccgagtgagtctcttcgcctcctcaatgtcaaatatagcccacatgaacacatcggcctatctccacacacatctacatgtatccagtccgtcaatccgtataaaagagttttatggctgaacgctccttcagttgatatgtgctacctaaattatctataaatttttgatagggctgctaaaaaaaattctccaagaaatctatttgtttcttctatttcttcttgagattatatctcttatctaacaaattgatattaaccaagtcccgcagcaacgcgcgggggcatcctctagtaagtttaagagtaggatctattttgattctctaggtagtcccactaaaaaatgattttcctgtacagggactcatttagattgcagacggatcataattggtcgcgtctgtaaaatcgtcctccatttttgtgtgcgactccttaagaggatcacacggaaaaatcgatttttgcatgcagatctattaaatggaccgcacgtgaaaatgagcatatttttcacaggcggacctattaagaagtccgcacgtaaaaatgcccctccctcttttccctcttacccatttcaaattttcccctatttctctcctctcctctctatctctttctcttctctcctctcctctcctccctctcgacggcgacagcggcggtgggcgtaggcgatgacgacggcgcgcggcggcctcctccacgctctaccgtgcacagcgggcccctctagcggtggagacgctggatctggcaggcggcggtcaacccctgtatggattctggctcccctcccctccccttccttccctctccgcccagatctggcagaggggagtggcgtcactggcggtgtcgctaaaaattttaaatctaaaataggaaatataggagtaaaatttagaaataatagaaattcataattaaaaaaacaaagaatgttggaaaaaggagtctaaagtccatatacaaacataattttaaaataacaaaagtttagtattagaaaataattaagaactactccctcggtcccaaaatgtaagcatttttagctatgaatagctaaaaattgatatattttggaacggaggtagtatcacgtatatacaacacaatatgaatattacacatggatagtttggtcaagttagtacaaaatttaaatatgttgttattttaagaaattctaataataaaataagaaaatatatatgttattatatgagagaaaggataagaatactagccgcgtaatttacggggccctatactaatctatctatctattatattattaaaacagccttgaaacgaggcaccacgttcgctgtggaggttagaaattcccacattaatcggagaaaaagaaaagaagagttcaagtaggaatacaatctaaaaatagctaaaattcagaattaaaaatatgcaacattaaaataggagtccatataggaacccaatacgtgattaattaaaattcagaataaaaattaaataaattttgaaattagaaaaagaaaaggaagagttcgagtaggaatataattttaaaataactgaaatttggaattgaaaaataaggaatattgaaataagagtccatacaacaatccaatacgacattagttaaagtttggaataaaaatataaaaaaaattgaaattaaataaaagaaaagaaaataagagttcaagtaagaatacaatttaaaattaatttaaattcgaaattaaatataagcaaaattgaaataagagcacatataagaatccaatagtagattaattaaaattcagaataaaaaataaaataaaatccgaaattaggaaaattaaaaagagagttaaagtaggaatacaattttaaaacaactgaaattaaaaataaaatatcaaaatatcaaaagaacacattacaaaaaataaaataaattctgaaattagaaaaagaaaaataatatatcaactaggaatacaatttataaataactaaaattgttgataaaaaattaagactattgatagaaaacaccatctaaaacacatgacgagattaattaagtaataagcctagagaggagcagagttgtggcggttgataatcaaatagaatcctaatgacaattaaaaggaaggacgatgggtaggtcgtgaagcaatcggtcaaggcggttggcggggacttttagaaagtaaaaaaataaatcccaatgataatcatatttgatttttaaaatctcaattacaataaaaatgagagacagggggcagatcgtataggagtataattgcagagcagccaatgattggtgggtcttctagaaagtaaaaaatgaattctaacgatagttatgtttgatttttacaatcccaatgataatatatagtatgcggcggacgagtcatagaaaagtatagtggcagcgtttgacgggatttctaaaaattataaaaaacatgaaacccaacaagacaataaactctaaaaactataaggttcaatttttaaaggttcaggcttccaaaaaataaaaaaataaaccccaataataatcatgtttgattttaaaatttcgatgacaataaagaagggcggcagcgggcaggccatagagaagtacagtgacaaagtcgctaacgttttggcggaacttctagaaagtaaaaaaaatgaaccaaaatgataattatgttcgatttttaaaatagcaatgacaataaagagaagatgcattggacggttgtagaggagtataatggcagcatttgacgggacttatggaaattataaaaaagaagctcaactggacaataaactcaaactataagtttttggatccattttttaaaggttccaaggagaatgaatagaaatagtggtagatcagcatttgacgggacttatggaaattataaaatagaagcccaactggacaataaactcaaactataagttttagatccattttttaaaggttccaaggagaatgaatagaaatagtggtagatcgagcaagctaataaagaataatatgacagaagtaaggggtagcaactatgtgacatttaaaaactataaaattagaaacacgaggatgattaggtttggtctttcaaaatcttaagacaacaagataactagttaataaattttaagtaaaatcatattaaaaagtatataattttatatgggtgctagccgcgtaattacgcggctttgaatggaggcaccacgtttactgtgggggctagaaattcccacattaatcggaaaaaaagaaaaggagagtccaagtaaaaatacaatttaaaaataactgaaattcagaatgaaatataagcactattcaaagaagagtccatataagaacccaatacgagattaatcaaaattcagaataaaaataaaataaaataaaatgaaccaaaacggtaattatgttcgatttttaaaatagcaatgacaataatgagaagatgcattggatggtcgtagagaagtataatggcagcgtctgacgggacttatggaaattataaaaaagaagcccaactggacaataaactcaaactataagtttttatatccattttttaaaggttccaaggagaatgaatagaaatagtagtatatcgagcaagctaataaataataatatgacagaagtaaggggtagcaactatgtgacaattaaaaactataaaattagaaacatgaggatgattatgtttggtcttttaaaatcctaagacaatgagataactatttaataagttttaagtaaaatcatattaaataaatatataattttatatgggtgctagccgcgcaattgcgcggctttgaaaggaggcaccacgtttactagggggctagaaattcccacattaatcggagaaaaagaaaaggagagtccaagtagaaatacaatttaaaaataactaaattttggaattaaatataagcattgttgaatgaagagtccatataagaacacaatacgagattaatcaaaattcggaataaaaaaaataaaatctgaaattagaaaaggaaaagaagagtccaagtaggaatacaatttaaaaataactgaaattcgaattaaaactaaggaatgagacaagagtccatataagaacccaatacgagattaattaaaattcagaataaaaaaataaaacaatatccaaaatttgaaaaaataaaagagagttcaagtaggaatacaattttgaaacaactgaaattcaaaaataaaaaataaaaatattgaaagaacactgtacggtattaattaaaatttgaaaaaaaatttctgaaattagaaaaagaaaaaaaagatttcaattaggaatacaatttgtaaataactaaaattggtgataaaaataaagactattgaaagaaaagaccatctaaaacacatgacgagataaattgagtaacatgtgtataaaggggtagagtggtggtggttgatatgacatataaaatttgttaataaacaccaaatagaatcctaataacgattaaaaggaaggacgacaggcaggccgtgaagcaaacgtgcaaggcgattgctgggacttctagaaagtaaaaaaaataaaccccattgataatcatattcgatttttaaaatctcaatgacaataaaaaggagaaggagcgggcggggtgtataggattatagttgaagagctgccgacgttggcgggacttctggaaaataaaaaatgaattccaacgatagttatattcaatttttagaacccaatgacaataaagagtaggcggcggatgggccgtacaagagtatagtggcatcgttttatgggacttctaaaaattataaaaaaagaaacccaacaagaaaataaactctaaaaactgcaaggcctaatttttaaaggtttagaacttctaaaagtaaaaaaaaaaacccaatgataattatgttcgattttaaaatctcaatgacataataagggatgtagaatgcgagccataaagaagttgttgatgaaaaacacgaggcctgggagatctgcttaactccagtgcaggtccaaaactcgccttcgggtatgctagcgtgccagttgatttgatcctgcaattaacaagaaacaaaggcaaagaaaacgtggttaaatccataaactatagccgatcgactaagtgccgatgacatatcatttatcttcgagccgatgtcatatatgcatcgatcggcagttataggtagataataaagaactaaatctactcgatcggctgtagatattaacaatatataatccttatgtcgatatatacttaaatcaagtgattgggatagatcggtcgccataccgagacagtataaatcacttagattaaaatatatactaacaacaagactatatatgttcatagcatagccgatcaaatagatctagcacgtatcggctaatactccgatacaactctatattaaaatattaaaccaagcaaaatataccaaacaaaagcctaatatacttaaatgcaataagatcttgacataaagggcagatttaacatgtcggtaaagcatataaagcaaatatagttaaatcaggtaagatcggctgaaaccccgatactaccctaatcggcaaccaagaagcaggctagatattgagattttaatcatgactcataagatcaaacaactgatacagctataagtatgaaaagaagagcaatatctagacaatcaagccattggaagtttcatagagtggtagatatcatatataatctaaaccaacatcgatatcctaacctaatcggctgccctctattagcagatgttagccaattgtaggttagatgacgatacaggggcgaagccaggataaatggtcgacggggtcaatactaatttagtgtatgatacattgttagatcttctaaaataatggggggggtttcaagaatcgctccataatactttgcttgcctatttatctctactacataaaaacagaatttatcatccaccctgaaagaaaaaaaaaagggggaaaaaccagacccaacagaaaactaaataacggggaaagtaatttcatccctcgaggggatatccctcgtttcgttcatctcatctaaatagctagattaatacgaaatatatcactccacaaatatgcaagttaaaatttaacttctacaaattgaaacaaaaataacaaatataaatgcgaatgtacgataactattttcagtttattttttttgttgtaacttgtagaagtcaaatttgattttgcatgtttgtagagtgatatatttcttatcaacctatgttgtcaatttttttataactatttagatgacatgcaaacaatgaggggatatcccctcgagggatgaaaatccatatcctaaataatgctacgagcaaccattggcccatatgagattgtcgcaacgcacggacatgtctataaattatactacctccgtttcagggtataagactttctagcattgcccatattcatatagatattaatgaatctacatattatatataaattcatttatatctatatgaatgtggtcaattctagaaagtcttataacctgaaacggaggaagtattaaaaaccggacataattaatatgtaaacaaagtagacattaaatgcacaaatactcactgctaagattaccaaaatgtatattgggcctttgggctgacgtataatcattagcgctagctaattcctatttgttgcttgctaatctcaaacgtgtcgtttcaagttgctaattaatcaggctataacaaatcatggttaccagggtctagtgtttttatcgaccggggtcatacacggtaaaattaagtggagtaagaaacgtacacaagaaatcgtcggggtcagtggaccccgatagatggctatagcttcgcccctgtgatgatattgccacagattatacaacatatatgataactcgacgaattacataaacaaaattagagtatcgtaaagatggaagtactaatcttgagaatgcaagctgccataacaagttttacctattgttgaaaatcgaaaccgatgcagctcaacccgaaagcaagaactcgtcgaaataaaacgaaagcaaaaaagggtggtgatgcgccgagattgtattgaacgtgtgtgttaattaattacatggggttcgggatctatttatacccgagaattacaaactatgtccatatcggacacgactcttatctctaacaaactttaagataccataagcctttgcggcagatttttacccaaacatatctctaaggaaattacataaaatatctaaattaatagatacaattgccttccctggactctatccatgcatggcaattatcttgaagcatatcaactagacccgatgtcgtccaccaagtcgtattgtcggaatcggctatatcacttaacccagtctaactcggactcagccgatcccagtcgtagccgatccggattccagccgattcttactctgtttccgcgataatccttatctttgattccgcttcgatctaatcttcctttctgatgctgatattaccaaatttggtcgttaacagaagtacaatgccaaagccgttgacggtttggcaggacttctagaaaggaaaaaaataaaaccaaacgataattatgttcgatttttaaaatcctaatgacaataaagataaaagacagtggacgagccgtagagaagtataatggcagcgtttgacgggacttctagaaattataaaaatgaaacataacgagacaataaactctaaaaactacaagatctaacttttaaaggtttcaagaagaatgaatagaaatagtagtaaatcaagcaagcaaataaagaagatatgataaacgtatggggtagcgcaattacacaggccacctagctattttttacaatactactaatagaggagataaagacagttgcatccatacccccggattgggttgtcgttttgtaacggtagcttgctgcctactacaagtagtcgtttcgtttggctaagacagggactaaaaaattttttttagtccatatcacatcggatgcttatatactaattataaatattaaacgtaggctattaataaaacccatctataattttggactaattcgcgagacgagtctattaagcataattaatctataattagtctgtgtaatgttacagtaaacattctctaattatgaattaattaggcttaaaaaatttgtctcgtgaattagctttcgtttatataattagttttgtaagtagtttatatttaatactctaaattattatctaaatatagagactaaagtaagtccgtggacccaaacaccacctaaggctcggtgtacagattaggcatgcgcatgccgtgacgtgactgggactccacggaattagaaagggcgccgtcggtcaaacccgcctgcctaccgttttgtttgacgagatgacagtactccctccataaaaaaataaaaaaaaataaaaaaaaaactctacacaagtgaaaattaaacgaggtgggcgccatgtggaaaaaacccatctccgaatctaaggcgttacactcgccccaggttacgtaccgctactctctctctctctctctctgttaagatcatctttatctctttgaaaaaagataaggaaaaataatcacctcgatcgatcactttgccgcccgttatatatggccttgtttagttctaattttttttttctaaaaacgtcacatcgaatatttgacacatgcatcaagcaataaatatagataaaaaaattaattacatagtttgcatgtaaatcgcgagatgaatctttcaaacctaattagtttatgattagccataagtgctacagtaacctatatgtactaatgatagattaattatgcttaataaatttgtctcgctgttttcatgcgagttatgaaattagtttttttcatttatatccgaaaaccccttccgatatccggtcaaacatcagatgtgacacccaaaaattttcttttcgtgaaatcgttaatttccgagacgtgggggaggacaaatccaaaactcccaacctgatcggcactggtagttcatagttggatgcagggatgcccacccagccaccgatccatggaaccgatcgacgcgtttgcttatttgaccacgtttttcaaaatcgaacaccccgtttaaccctcttttcattacaccgttaggatttcaattagaaaaaaaaaatatttactatttaaattgaccaaaataccctcgacacacttcaaccctatccaggccaatcctatctctctctaatctcttgcgagcggcgcacagagggagaggtcggcggcggcggcggaacaccgcacgccagtggctgcggcgacgccataacatggcggagtggtggcggctgctgcgtgggacttcggaggcggcgtcacacggcggagtggcttcggggggcggtggtggctgcggcgcgcggcaccgggggcggcggtgtgtagagggaggtcagcagtggcatcgtagtgaggagattcggtatcataatcttcggttcacaaaaataacatgttaccatgagatttttaaaagttacatatcaattgtattataggtacatgcaatatacaataaatatactatacttatatttgttaaaaacttttagaaaaaagatttatcgataaatatatatatatatagctattctcaaataacctatttcagtgttgtggatgacggaacacggatgtcggacggagagggttccgctaaacgattaatcggagtacgggcgaataattggtatttgacggaaatttaatgttttgtacaaatatatgtacataactcataatagcttattatttttgatagaagaaaaacttcaagcatgctcacctgttcgagattcaaacagaagattaaaatgacaacaacaaaatatggagattggatttgaaagaggattagatgaaaagaactaaccctagacttgcaggttgtagcttcaggaatgagttgcgagggtttttgattacaaacgacgtactgtagctatatattgctaggttacacaactaatgggccagtatcgtgggctggctgggcagggccttccggccttgtcacatgatttggccgtttattcggccgaatagtcggaaacggccgattaatcactaatgacggtgattatacatcctaaaacgattaatgtttagcgttttgctcattcgtgacggaggggtcggcgccaacgtattaatgcccgaatatacggccgtaccaaccgttatccacaacactgacctatttgggcatggtaagctggtgtttggatccaagaactaaactttagttcctatcacattaaatgtttggacgctaatttgaagtattaattatagactaattataaaactaattatataaatgagagctaattcacgagataaattttttaagcctaattaatccatagcacatgtttactgtagcgtcacatagtctagtcatagattcgtctcgtaaattagtccagagttttggaataggttttatcattagtttatgtttaatacttctaattaatatctcaacgtctgatgtgagagagactaaaattatccaaaccgaagtattggcaggcatacatgcacggagagttggagacgggctggcatggcccatttggggagacagtagcggagtacggaggagcgacggggcaagcggagccagcgcgcgaattcccgtgagacgcgtacctgcatgcaaggcgtggcgcgcccaggtaggctcgcgctgccgcggggtgacctgtgtactgtgatctatatcctctcgctgccgcgtgtggttgccgactgtacggacaccccagccagcggcgcgacgccccacggccttactatgcccttctcgcattggaccgtcgaggagtagccgtagttactcggtaccctagtacttgccctttccgtagcgtgatggttgcgttgggttaattggccccccagctactcgagttcggacacgtcgaagccccattggcccacaccgccaggtcactccacatcccaaccaacgcgattcgtccacgaccatgacatgcgatcaccccaccccctccctcaagtccacgcacgcgcgccgcgagccaaaaaaaaaataccccaaagcgaccgcggccaaggaatgaaaaaggtcgcgagaacttgtggctgggagggtccagggcgcgcacacgcgtcctccccctgccgatcacctttgccacctctcgctacgctatccccgtataaaatttgcgtcactccaccatcccctgcatcccgcatttcctccactgcataccaacaccaaccactgtactagcactactagtatagcaagaagggtgatgacgacgacgacggcggagggcggtggcggggtggcgccgttcgtggcgaagacgtaccggatggtggacgacccggccaccgacggcgtcatcgcctggggcagggacagcaacagcttcgtcgtcgccgaccccttcgccttctcccagaccctcctccccgcccacttcaagcactccaacttctccagcttcgtccgccagctcaacacctacgtacgctctcgctttccttccatcccattccctgcttcctgctcgctcgattatattcaaaattctgtcatcaatggattgtgcaggggtttcgcaaggttgatccggacaggtgggagttcgcgcacgtgtcgttcctgcgcggccagacgcacctgctgcgccggatcgtgcgacggagcagcggcggagggggagcgaagaggaaggaggaggccggcggttgcggcggcggaggggaggcggccgccggggacgtcgacgaggagagcgccgtggtggccttggaggtggcgcggctgaggcgggagcagcgggagatcgagggccgcgtcgccgcgatgtggcgccgcgtgcaggagacggagcgccgccccaagcagatgctcgccttcctcgtcaaggtcgtcggcgacccgcaggtgctgcgccgcctcgtcgacagggacaacaccaacgccgccgcctccaacgccgacgactccgccgtgcatcatcaggtcaagaggccgcgcctcctcctcgactcatcctccaccaccaccacccacggcgaccgccacctcgtcaccgccgccgcagacgggttctacgccggcggctgcggcccggaggccgcagctgccgccgcgttcgtgccggacgacgcggtcgacttcaccggcctctacaccggcggcgacgggttcggcaacgccgtcgtcgacgccggcgtcgactacccgccggcgtacgcgttcccggtggtggacagcggctactaaagctgtaaccgctttgagattcgtgctcttgttgccgatccaacgatttgtgtacgcagtagtattttccgtttcagtttgccctccccaaagtgtttggacgaagtggctgtgaacggcgaaggaaggaagctaggtagctctcctagtagccatgttgggttttttcccccttgttgggggtttttggtctcggtgtgtgcctgacttgtgggccagccgggtgtatatgcgcaagcaaaaaaaaataatagtactggtagtatctaagttcaacaaaatttgctccgtttgaacaaaagatttcaaaaactacagaaacaggaaaagcacagtattaggaatcgaatgttggaatcgaatgttgagtgtgccttgtttggatggttatgaaaggaaaaatattttttaaatgtttggtaccattcatttttagaacacgtttaaccgttcgtcatttaaaatattttgtgaagcatgtaaactatatttaataataaataaaagtatatttaataataaatgaaatgataggaatgtttaaaaagttaacggtaaacggagagaatacacaggaattttcccgcgatagctatctttgtatctttcactttagactatcacaaggcatcttagctcactttatctttagaccatcttagcatagcagttgtttgattttattgccatcattatgattcaccacgcattttttttagatgagattcaccacgcattgtagctcattttagctatatggtcccatatatgacgtacatcaatttacttatggctaccgttctgctagccgttctttccaacgtaagccacacattcttgttaagacataataggaagtttaagtgtggtttgctaaagctagtcactaaccgaactgaacaataatactctcctaattcaaatcgtacttcacttatttgcgttggccgtaaaataatctttaccaggtgggcaaataagtgaaatacccctccacccccattaaaaattcaatcctaactacaaacctagggtatatttaggttcataattagaattgatttttagttatgtaggattgatttttagttcataactaggattatatttaggttcataattagaattgattttttagttcatataaactaggattggttttttaacagagtagtacgattaaccatgattgttagtacaattaacccaacacattcctcaaattaaagtactatcacgttgcgacaagaagcatcaaatcaaacaccccgtaatccttttcaatggcgagtgctgacgtgctcagccggcccagcgtcaccctccggattggagcggcaggtttcgttttctccgctttcgctgtcaacctcaagagggattagctggaacaaaatctcctcatcattcgattaatttaaatcaggagcgtctccggcgagcgcaagcccagccaatcgccgcaccgtacgtgggcggtgacgaggcttcagctcggtggagcagctggcccgctgccataaatagtcacccgaacaatgctaaacaaaaaaaaaatgcagacgcagccatcacggatagtatttatcctgtacctctcgccttcacgatcggtggccgtcagctgatcatcgatgggcgatggcgtgacatatcccttgggttgttgacagaaaggtataaaaattcgtccaggtaggccgaaaggcgctagtctcgagctgatgagtttgctagggtgcatacaaatagcatgccacgtaccacttctacaattcaggaccacgatgtgctgtactatagctcaatgaagaactggttaagtgcattttaggtaactacaaatataataaacaacagaaggcacgattacaacagatccctttgtagtttccagctatagaacccgcatccgacaagtcagtactggtccctagaacataatcctagaaaaaccgtccccatcattcaggggttagtccaccccgagcagtagtaaattattactactaatagtagatggttagtgtgatgacagtcacaaagtccaagaatttagctgcagatacactacgtgttattgcaatcaggaaggagtgactttgcgccccaagtatatatcagaacctccctaacaatcttctcccaagggacttctgtaacagtttctatacaccaagatgatggggcagaaattgaagtgagggaaagagacagattgatcttactgcatttacagttagcaagtccatgacaagaccgtgacagattccaaagcaggatgccacatcagctcttccaattctacaacctggcatttcacatttccatgaattagtataggaaagggcaagcgtagaaatgtcatgttactgttgaaataattcttttgagcaagttggacatcaattttcattcccaaactgcttcatttagatgtgaaatacatgcatgagcaataaggaggacattacgtgaacatatgtggacggtttcgggaaagctgaggacgtttcacaggcgagattatcatatttcgcagagctgcagaagtattattcatggcagtgccgaatacgggccgtgctggctgtctgggcctaatatcaaccggaggcgccgcattgtgagcaggagatcccgcagacagctcaaatggtccagaggtggaccgacgttgccttggtggtggagcccatccctcatctctccgccctggagtttcaggaagaccagccaatcctgcagccagtgaataagctgtttttgtggagggctaaaagcattttaacttttatatatttaatagtggctactagcaatccaagcattacagttaacagtttttctggttggaagcataacaaaagggtgtgcacagaggaaaggatgagttatatggtatgagagaactaataagctgaatgataacatgttaaattaccttgtctcagagggtcgctgctatccattatgttgggcacgcctgagaacaggtctggctgggctcttgggaagtagttgttcgcaggttgaattgctgaacgctttgccgactcatactcgcttctcagctgatcatacatctcatcaagcttccttttctgcctggaaatgacagcagtcaattctccatataagttggatgaagcagaggtttattcatatgagaattaaactagaaatgtactgtacatactgacctggatttctcagcaaatttttcttgtagctcttgcttatccctcgacaagttttcaacctcttgttccatcaactggcattttttggccattttctggtatgcagtatgaacttcttccagcttctcagtgaactttgcctgcataagttcacacttttgcctacactgaccaacaattctgttcatcttgtactgcatctccagttccttttgcccaatgtaaaacatgacacttctgtatgcactcttcataactgattagcatcatagttagggaaaatctgaatagtcaccaagccttagacaataatcatataaacaattttgatctttcagatttttgcattactatgacaataaaacaggacaagaggctagctacgccatagattccatatagcagttagtgatgattttcaacaaaagtagcacaagaatcttacggacaatgagaaaataataaggatacgtatctgtggagaaactccagccattgacatctgtaccaatgagcagactggctgttagaaaaagaaggattgcttttatctacaatgaatcgtaagcgaacttacatttgtccaatcatcatttggatttgtatcaacaggtctcatatggctgagaaaaaaaattataatgtttagactgtctcaaaatagtaaaccactggagtccattttcactcgaacacatcaaagaagtataaaagcttcaaagcatgctagaaagtaaactccatgtgttaagcacccattcggatgaaatgacatggcaataaccatcgagatgataaatatgtatgcgtttgaggtacttttggcatccctaattgtcaaatcatgatgtacattcaaaaatagcttacaggaaagaagagaaaatgtagtatgagataatgaatacaacttcaagagtaaacaacagacctttttgaaagcacttgatcacaaatcgggcatgcagcatcattgctcagtattttcttagcatcctctgtacctgctcaacggataatcatcagcaaggatcagttatgtatactgcaatagcagcagacaatgttagtttacaatgagaaactggttaagcaaaactagtaaggaagattgcaggcatacataaaagatgaccgcaggttgttgatacagcttgcccttccaactcccgccagcaagcattgcacttcattttgcttctcactagtaaattaagtacagagctggtaatacgcagaaacctgcaggtagaaacatagaattatgagttgcaagatataaactgaatacagacagcagttgtattctgcatgtctgaacagaaaaacaaaccgagcagagacagatcatagctacctaagtatcacggatcaaatgaacaaataatcatatttcgtatgtgccatttggaatagctaaatgggataacccttcaggcacttgcactactcgcatgataaaagaaatggtgcgacacttaatactgataagcagctagcttttgtcatctttttagccaatgaattctcccactatttacagagactacagtcctgacaaagggtagctcaaaatgcactaaggactatgcattcagaaccagttctgcatcgcacaacatgtcactttcttatgagctattgcaggagagatgggattctacagacttagtagtaaaaaaagcataatactacctatgaatcaaggcttacggagcaattaatgaaataaatccaattatcttcaagtaaatgatcatttcaataatattttgcgcatgccctgaacatagaatgcagcataaatagaatggcagataaagctgtagcatctagaaccaccgaagcaggcaggactacataatagacacaatatacgagcatcatgcacgaagaaattgcaccatttccttcagagcccaacatctgcagttgaaatccaccaacgaagcactttaaatatcagcagcggagcaagctttctattgggagtacgaacagagcaaccaatcgctggtggaattgcagaaatggcgatgacaatcgtactaaatattgctcccatgagcgaccaaaccgaagccttagttcgcaaaacccgtaatattgcaaaaccgtaaccattccataaatccccagcgaactggaaacgagttcccacaggaaatttcacagccagtggcatctccaaacgcaccaataatcgcagtatttctaggtagaaacactacaatctccgcaaaacacctgaaatttgggtcaaaatagcccctaaaacaaacctagatcggatccatcaccaaaacacgccacggagaaacgaacccccacgatatctgccggtgcgattaccaaacgggggcgcgtcggttacctcacgcgaaccctcggcggcggaggagaggcggaggagcgggggcgcagcgcaacgccacctgggcctcgaaaccctagatccggaggtggggggtggggggctccctccgcgtcgccgatacgtcacggcggagatgggcgagcgggggatcaccgaatcggggcgccgccgcggcggtggcggcagcagcggcagggagggggagagagagagagagagagagagagcgcgggtttgaaacgggagaatggcaaaattgctttgcgaggcggagggggccgcgtcgcggtgtccttggtgtcagtcactgacaagatgggcccactgggctcggaggcgctggttctggggccacggaattgggctattgggcccactagtttgcttagtgggctaatgagatgaatcgtggaattttttttatttatatatttttttattaaaatattttaaaaaataatcttttgtttcgaaaatttacaaatgcctctcgcccgctgggaaaaatcaccctcacagagggtattaagggacctaaatgtaaattttccagtataacttgtcaactctatgattttacaatttaaaattatattatataaagtcaaatgaaataaaactttatataaaaattttagagctcgaggagatatacaagtttgtagttaacaactttttcatttaagatcttttagatatccaaatattcgttacaaaatgcaaaacctattttttaaaaaatctcatatctacatttcaaacgacattggatggagataaactttatataaaagttgtagatctggatgatatctacaactttgtagcttatcacttttccatttaaaatcatttggagcgtcgaataagaattattagtttttaagcaattaaaaccggtggaaagagtttgaacacaaataaaaaatttgtatttaggtcccctaaagccctctggaaggacgatttttaaaaaatgcccttccagagggcgagaggcgactagaattgtaaattttgaaaaaaatgtttttgtaaatattttaataaaaatgtaaaaataaaaaaaatcatgaatcgtggggggatgcctcgttatgtttactacacttttctgtttgggtcaaaggcgtttacgacacggaactgtctatccatttgtcgggtgatttctaaaaaaaaaaatcacccaggttttttctacccttagatttacatccaaataactaaaaaagaacacaacaatacatatttacttacacaatatttttatcaaaattacaacgcacttacatttcatatcaactgaatttgcaaatgtaattttagttatatagcactgtaattttatattttaaagaaaataacaaatacatatttacttgcacaacatttttaccaattacaatacatttacatgtcatatcaactgaatttacgaatgtaattttagttatatagaactgtaatttcctgcactaatcttgacacacgatcctacgcccaggaaaacatcaaatatcagagatgtttagcaaagtcgttgcgcacatgtcacaagttaaatacgtcatgtgatccatagttcaaactaaaaaaaaaagaggatgctatgaacttcaatcacctttaacctaacactgaactccctttaatacaacactgaattccatgagtggggacggatgaagggagtagggggtaattaactcaccaactaacggtgaaagaggatgtgactcctcgacggtgctcaaagcatcgaaactcttgcagagaacttagagtttaggttccagggtgggagtcgatgtgagaaagggtggggagaggaaggacggagagctttcacggatttagagggatagccgagggcgacgaaaatggcggtgggcggcaaacataggtgggtggcgaggcgggagtggttccttcatagttgtagaattgaagggcaatgggtggagaggtcggcaggagcgtggaagtttgggtggttaagaggcgggggggtgttaggggtgtcttcaatgacgcgagccgctagagacaaggaagatggcaggggtcctcactgctgcccggcttgggaaggtggggaaggggaggaggaggaagccagttagagcagtctcgttggcgcgaacaattataaaaggcgacgcattagtggtcgaggaggtagtggcgctcattggggaggcgagcgttcgatctagcgttacctcgaaatggccttatcataggtggtcctcctgaaggcctcgcctataattctatagggaagtcgtctatgaaaaggtatttcttaaggacaaggtgagaggggagaagagattaggacaaggtttctgtagcatacgagttgtagcataatctataccatctaaaggtgattgaaatttgtgggtattttcaggtaattgaaaaatcaaacaattctataacaaacatggtgtattgactaggttatagttactactgagcttactcggctgcactagctagctgcagcagcaaaaatcggaaggtaagctaatagccaactactagccgcaggccagcagtagacggctagctacgccatatccatagccatagcattgactactcatgagctcaatacttacctattcaatgggtctagagtagaattagagatggatagaaggtggagatgggtagaataggtaggtgggaaaaattgatgcatgacatgttgtcggtaacatattatcttttatgcagatttacgattataattgggtatatagaccttatttagataagtttaaaattttgagaaacagctggtaagaagtcagctggtgagaatatgaaaaaaataggtaggttacaaccaaatttcgttattaaatattataaatgatcagtactatggagtatatatattaataggcaaataacctgcggtacagcccaagaagattagagcatctccaacaacatctccaaattagactctccaaatactgatatagccaactctttaactggtttggatagttaaactaggtgttcacttcaacagtctctatatttacatctccaaaatgataaaggacccacatgtcagcctccattgccttcttcctcctcctctttctcttctcccgcatcggcccatcgatccatcctcgagtacacacgcgcgtgaggcgggaggcgacggctccccgcgtgtgcgaggctggaggtgacgacgggcaagggaagctggcgacggtgacctcgatcggccaccggaagagagtgggggggggagaaagaggagggagagagcatctcacgtgggacccacgattggtaagctaatttggactggccaagtttggctactgagagagccagtttggccagccagatggcttggccatccgtttagcaatactattgaagctcgtttttagtccatagctatcaaattttaacttggagagtgggatgaccactctgttggaaatgttcttagtcactatatttcgtgtactagcatatatttcacctagcagtggttttctaagtatcaagaaaaaagccaccgtccagagccgaaatggagaacaggagaatgtttgaagtcaacctgcgttcttctattggtcatgtttccgcaggtgctaaattacctggcagactgctactcgcgatgatgatgtagattttttttagttattgatggcaacgctccctctctcattttttgaataatccgatgagcaaaacgaatggaccgatgagtagtacgacacaaagcctacaggattattgaaagcggtaggcaaagtaagggttcaatttcacttcagtcaacattacaccagatcgaatatatattcaaaggtgaatgccaatttttttttcacctttcccgttacgttttaccatctccgtcctcgtattgtggttacttctaaaatttaaatcttgtttattaatttttcactctcatctcaaatgatgataatcatcttttatttaatttttcacgtaatcttcttatcttaactttaatttaaaaaacagaaagagaaagagaaagaaagaaaaagagagagaaagtaactaacaatacctaactatatgtctttttttattactccacactcacacactcacaaattgtacacactcataatccgatgagcaaagtagtacacggtaaaagtgcacacatgcaaaaacacactcacacatctatgaatatgtatttcctaatacacgtataataacactggtggagaaataatctttggtcggttgacccaaatccacaatagtcccggttccattaaaaaccgggactagaaacgatttttagtcccggtttataagaacaacaggactagatgatctttattcctggttggtgttaccaactgggactaaaaatgatctttacaccaaccaagactaaagatgatttttagtcccgattggttccgtgtcaggcgcctaggatcttataaatcgggactaaagatctaagtttaatctcggttggtgttactaaccgggaataaaaatcaacacgtactataaaatccctattacttatcctcttctctcgtccacacagcaaactctatctctttctttctttcttcctctctaactcctgccttatctctttcttccttcctctttttttgattgagcgagatcgagcgcgagagcgggccggccaggcggcggccggctcggcggcggcttgcgcggtggcggtgggcggcggcgcggcggtggccggccggtgcagagaggaggcggcagcggctggccgggcggcgcctctatggttttttttttgaatttgtgatttattgcatgatcctgtgatgtatttgatttgtgtgcaatgtgaacttgtgatgtatttgcgatgaattttgtagaacttgtgatgtaatttgatttgtgtgtaatttttttaggatttgcgatgtatttgatttatgtgtataagtaactttaagatttgtgatgtggatttgggatgttactttgatttgagatttagggatatgcatgccacttgattcgggagaaaataaaaaaaaagaaaggggaccatccgaactgctgttattctctctttagttcgactagagatcgatcttgtttcgaattcgtagtctcggttagataatcgggactaaaaccaacaacacttttttattttactaaatttttccataaaaaacatgcatgcatctgcgcaatatttatgtgtaaatcctgatgggttcaatttatcgtacacaccaccacaccatctatgcttccccgcagctaattaattgcatcttgatcattgattatatggacggaggccatctcgatctgtcgtgatcaccacagttttggctggacggtgtacaattgcatgggagcacagtagcacagccgttttcttggtcttcgagacatatgactcgatcgcgtcggtgttgcttaacggcgggggtgcaactacgacgacttcaatgaacacgtgtacgtgtatatgtgtcgtacgtgctaaacaattaataagcacatgccttcaattcgttcgttcggcaatttctcacgttttgctctggtgacatgcatgtggaaatatatatgtgcatcgatgtcgttctcaatgcaagtcacatcgatctatcttcaggttttactaggtgcatatgcgtggatcgaaggtttggcgtgcggctggtagaaatcgaactggaaatctgcaaacatgatcacacctaccatgtacgatctgagcaacatgcgtactccctccatccaaaaaaaaacgaatttatgacaataaatctagacagatgtatatttagattcgttgtactaagatgtatcacattcagtattaggttggtttttatgggaaggatggagtatatctttcttgactaatatgagatctttttaaataatttaattcattctaaccaattattatggaggttacatgacaaataactaaagactagaaaactacttcctccgtccaaaaaaaaatccaatcctgagtttgaatctggacataccaattctgggtttgaatctggacatagagaatctagacacatagattcaaaccacacatagattcaaacccagaattagttttttttggacggagggagtaattaaaaataccaccttaaatacatagatcgattttcttgtatggttagccagagtatatatgtataacaattatttgtcacaatggctcaaaatcttcgaaatcaatagctaattctttgtcgatttaattattttgttgctactatcaccaccggcgactgatgttaaccaaagcaaattataacatcaggagagtaacttttactatgaaagaaagtaggagagtctcatgtagcatatataatatatataaatattaattacaagtcacatatgtacattatatataatataatatataaatcagttatttgtctagattttttttcaccatcattgttattgaacccgatctggcgggtacaccaccacaaggacatcgtgtcattagggaacttccaatgcaacggttataagaaggtcatgacatctagaatatcgtcatcactattctgaatatctagaacaatgattttattcagagagtttaccctaaggtacaaatgagggaggggcatcacgacatcacctatggaaagataggtggcatctccaatgtcatgactctaacgacaaccggcttttccacagtggcgactagaaatggcattgtagccacccgcacccaccattgccaccaaatctggccggggaaccttagtcactaatagagaagcccaccgtcaccacgtccaccactaccgcacgtcatcctcttgttgtcgccgcacaaggcatggctagatccattggtgggtccaagagcagcccgttcacttgacatctccacactaggctaccaccatcctcttgccttgccttcctgcatgccactgtcccccctgcctcgccagtgccacctgtcacagcctcctgccacgccatgtcctaggaacttctagctagagggtgtcgccgcaatccctaccaccactcacctttctcgaggactaccggaatccgacgctcccctctagcgatggtgaggaggagatccacaactatgtcgcctagtgttccacgatccgcaaatactaagtcatttactaatgtgagataaattaaatagtctatttgacgataataatttctaactatttgacttggaagctaaagaactaaacctgatgaggacatcctccactattacccgttggcaaaagacgcaaaagtcgggcggcgaccgtgtgagcctttgaataatcccaccttgcttagcttgggaggaggaagccaccttaaaagggagagccaccattcccctaatggactagtcttttagggagattgggcctttccccgagtgggtgggcctaagaactgttggggttcggacaaccttaatttgttgggcctcggccaaccccacctgggccggattgttatcaaaaccacttaacaaatcagtgaacttctactgttgttggcacttcttctcattgtcgaagcctcgaagggatgggtggcagtgacggtgaaagataaaggggaacacgataaggtacttgggggtgaggcagaggccatagcacttgaccctactcttgctcggagcaccgttgtccctgcctctgctccaaggaagagggatggagctgctgcagtcgaacgggctgcaccgccctgcatcgccaccattgctgaggagccaccctgctgttgccctaactctagatttggctgcccatgaagccatcccagcttcggatctagccgtccccgctgtcagcacatgacgccgccgttgagaaggaggaggtcgtttggggagagggagaggagatcaccgtcgaggtggaggaggctgggagaagcgagagagaaggggcaagggaatctagggatgagcgatggagagagaaatgtggcaaacgatgaggttgagaaggatccagaggcgaaattaaataaacgatcgagcgattcagatgaaataaaaaactattttgtcggtggcctccacgcttcactcgaatgtctcaccacgatccatctgtgctggttttaaaaagaacgaaaccaatatatgacatataagtgtcggttataagaaccgatgaaacacatataagtgccaatttttattaatgaatcgatacaatatcattagtgccggccggttttattacaaagaataaaatcggcactaataacatctcattaatgccggttttttatccttcagcgctcccacgggcatgcgcgtgagcgggaaaagccatatgggtgccagttcttgtgtttccggcacctatacgcccgttccctatttgcttttctgtagtagtaatagcttctgatcttgattgcaatatgatcaaaaccgcctaaaagaaccaatttatattaatttgggataattaaatacttatctcgtgggaggacttaaactcgtgggaggactgaaaggttttttggaacaaacctacagagggattcgccctcttgtagtgaaggtagtagatggctcttaattacatcgcaaatgtactataataaaatttagtttcatccgtcatgatctctccagaaaagtatttcaccgcttctaattaactttatctcgagtagcttttgcaatgaaaaagacactacacactatccgcctctttcctgcctaaactctaaaaagacatggaattcctgatctagataacgtaaacatcgctagctagaatgtcaaaaatccggctgcgccaacgattcattccaaggtacacaccgtcgatcggtattcatcacggacaactatcggccggcccacatatgatcacgaaacaggatcaatcaaagaagtaaataaaatgtacgaaagcgatcggacggtcggactttatcgatatcgatcggatgggcacccggtccggtcgatcgacgtgacatccatagccatcacaaacgctagcttggatagatttgcaagggaccagtagtattacaagctgggaagggctagctgcacgtgaggaaatttgtgaaaagagagcaaagctagctagctagagctagccagccaatatatttgatagaattttctacgcctctgtttgctgtactttattgaatctgtttctgttatgtcaatttcagttaatcatccagtgaagacagaatcaagtttgacaaattttgtggctattattttcttacatgaggtttctacatataattgatacacgtactgcatgctaagaatctatgccttttctttttcgaatgaatggaagaatggattaatgcatgcaacacgcttctaagcctctaaactgtccgatttttgtaaaaactagagaggtatatcaatttattaaataaatattttcaattcaattttcaactatacaataattaattaattaagttgtaccatcgaatagtgatcacaaaatcatccggttatatgtatataaagggacatttaattatttgccacttttaagatgtgtcaattaaggatttgccattcgctatctatgacatgtaggccctcatgtatctatgacatgtgggccctcgtgtatctattacatgtgggtctagtggcaaatcctctagaaccactcgtaagagtggcaaatagttaattatttcaaatcctattttactataaagttgatgcccactaactactaaaacttaacatgcaagtgtgtcacatcatcactcactagtaattattatctagagtattttaaatatcatgctaacatgacatatcatttacaattttgttgtatttttagaactcaatatgcaagcaatgtcaaatcattatctccatatcattttcacattatttaaacatatacatctaccatttatataatgtgtcgggcccctttgaatcaaaagatttatctaggaatttcataggattcaaatcctataggaagttttccaaatcctatgaaattcctatggaatggcacattgtatgtggattttggaggaaatatagcaagagctctaaccttttggaaaattccctttgagtctatctctctcatccgattcctgcgtttttcctgcgctccaatcaaacgaccattcctgtgtttttcctgtgttttgcaattctctgttttacacttcaattcctatcagaatcctgtatttttcctattcctccattttttcaaccctgcgattcaaaggggcccgtaacatgcattattccacatatcccgtagcaaagtgtaggatatcaactagtatacaatatatatagttgaaacccacattaattattaattattaattataaatagctgccacagaaaaccacccgtatcactcgtgacctttcactaatttggattgatggcccattgattttattttatttttgcttttgattaggcatatctctataagactatgtgtattgtaatttggaaaatgctatgttcacatctcaataccctattaccgcaacacacgggacgctatctagttaacatcgatgatttgtcccatcatatcatattgtatcagaaattttacaaataacaagagaaaaaattataattaataggtatatgatcctctccctttcaaaagtacatcaggtttgcacatgatctcagcatgctggtgatgcacaatttatatgcattctcttttcctatatagttggtatccactacaagcattaacactataaagaagcatccaggttaagccatatcatcgataatcaatagccgtcggatcaaatgcatctttgtttgtttaactgtgcatgctttaagtaaggaaactgccatgggtaattaggcacatcaatggatgacccacttaagtgctcctggtcatacattgcatccatccaccatattaagccactgctatatccgttaaccatctactactcaaatgccaactttacactttattattttagaatgtttatttttgatatttcaattcttcaattatgtttgtaagcacatatttacaaagttgtttatcatcaccataaaatctcgcagcaacgcgcggggtatcaaactagtactattaattagaggctcctttgaaaatccccacatcaataaaagaacaatttagttaggataatttatatttttgtgaaattagaataatttaataaattaagttaaaatgttagaaatttgtacattaattgaaaaataaagttgtgcaacatctctaaaaacaattggttggttgccatacattcgaatatggaacaaaataaagaaaatgatcgcaaaaaaaatcataaaaaatatacaagtacctattggcgccttctaatgaattcctcctcctgctagaactacgctctatacatcaatgtcattaagagcaggtaaaataatgagttgcaaaactatgccacatcatcatattcctgtgtagaggggagagaagagaagagggatagaagaaaacgactgactaatttgtagcccggcgatagagattttttagttggtatcgctcgcttgcagctgctcccggcgattaaaaacacacattgtggggcctgtgcaaccacagtggatcatactacccctccacattgccctccccatctgcatcgccctcccctcccgatccccttcctctcgatcgcctccgccccattgattctcaacgcgcgagaccaccgtgacgatttctcttccgacagtgcaatgtccccctccggctcctgtgcttctcctcccctctctctgacgcagctcctgcgcttctccacctctccctcccgcactcgcgaaactacctatatatatgacaaaaaaaatccagtcgctccaaaattccccatcgcaatatttcgccgcttccgatctccttcttccgctggccacctcgaccacagccctgctcctcttccaccttgaataatctctcccgcccccgtgagaaattcctgcctaaaaccatagttccccaccaccaacaccatgtctcaccggacgaagagggaggtagcactagctccttaggccatcgtgagctctactggtccttagaaaagtgtgtgaactatgtggtgttttgtgattacttctgtagcatacaaatgttaatgtcaaaacaaaattggctacaataatgatccacttcactcttgatcatacacattgacatgtgctagttataattaattattttatttatgagatgtagctagccaacaagcaacctattgtatgagtagttggcttcagcattagctatagaatgaagtgtagccggcaataggctataatattagccttgctctaattagcaccaaatggatcaagcagagtccccaattaaccatctagctagatccccactccaatggtggcatctcctcccttgcagatgatctcctcgtcctctcgagctaataactcaaatgcggacacccaacgagatgtacctcgatcggggtgtgtgtgtgtgtgtgtgtgagagagagagagagagagagagaagggtttgcattgttgacaaggaccagcatgaggcaaattgcagaataattatagcttgtaggataagcaatatgacttagggcccattagcactttcaaacggtccctaagtcattgccatcatagtaatggatgaaactaaatttatgataattattcgaggacacaagcgaacgaattaaatattagaaatatgataagttgatttaaaagagttcactaataagacatactaatgaagaaagttttgcattaatcataccgtttagaaacttgaaaagcatgcatgaacgcgataatctgacaatgataataaaaaaagaacatgcccttagctagagtacgtttgccaaacccaggggaagagaggaaggaagaagggggagaagggcaaggggtatgtatggatcagcctaagaacgaggtgcagataagggtagaacacaaagtggagtggtgcttcagggtatccaatcgcatggatcatgttggacgcccaaataaaatcattgtcaaattaaaatgtagatcatattgatattagtatagtgtgactcctaaaaattcagtgaactcaacagcaatattgtatggcttcaaccttggttaataaaaatgggtgcacatctgtaggtcggcctatccattccgggccaagctaaaaaaaaaaaaggtgaaaaccaataagccaatagtgaaggagagaatatttgacccgaaaaaggccaagaatacgtaccagcagtgatctccagggcgctctcaagtctcaaagattctaagctttcccttctttttttttgaaaaaaaaaagttgatccataagcctattgaaatcacacacatggcaaaaaggatgtgctgtcacatacaaattaacagacacacgcacagcacacacgctagagatgcgtatgtagctttatccatatttcattccaattgttagaaaaggaaaaagaaattcctttcaagttaaaaaggaaaagagaaatgcttacgacctgtgtacgcatgcctcaattctttttcaatgatagaatcgagatgaatccagtctctatatatgaagatatacttaaaaaaaatacacgtgcgttgcaatgggtgaaggctatatatcttagggcttaggctctgttcgcaagagctggttcacaactccctgctctcgttttccgtccgcgcgcttttcaaatagctaaacggtgcgttttttgaaaaaaaaaatctctacggaagttgcttaaaaatcatattgatccatttttgaaaaaaaaaagaaaatacttaattaatcacgtgctaatggaccgttctgtttccgtgcgtactgtttgggtcaggaaccggttggagcgaacacagccttaatcttattattgttatacgatttagctaaactgaaattcactataggaatttacttgaatattgtttttacaagatcatgagctacaataattaggagtccgattgtctcaagttagcatgcgagttctttaaagagaattcttatacgactctttctatattttcaaaagcaaacgaatttaaaaacctacccaaatacaaatatgtaatttcaaaagcgaatgaacttaaaaaccggctcaaacatgaataacgtatcaaaataccggcaaaaacatctttaatttttataatagtagagatatattttgacatacatattttgttttcttaaaaacaaacacaattgaatcgagtctctacatcaaatatgtagttgaacatacatctgccgtcctaggaaatcaaattaaagacacgctagaaataaatttgtcagacctgtcaaaatctaggagaatttgtcaccgaagcgccggccggagaacgatgcatgcgaatgtgtgatgtgcaaggtcggcagtttgtaccctataaatagcacgcaacccttgtagcttttgtcccaacacaacacaaaccaattctatctacacagctagccatcgccgacgacaacacacacccaaaaaacatatacagcatatataccagctgcaagctcctgtagctcgcagtatttgttctcactgctgtctagctcaatccccagcacaatatagctagctagcaattcgatccaattaagcaaatcgtcagaaatggccaacgattcattggctacagggcgtgtgatcggagatgtcctggatcccttcatcagcaccgtcgatctcaccgtcatgtatggtgatgatggcatgccggtcataagcggcgtggagcttcgcgcaccggcggtcgcggagaaaccggtggtcgaagtcgggggagacgatcttcgcgtcgcatatactctggtactattttcgtgccatctttatacaattttagtgttaatacattggcgtataaagcttttgcgcgttaattaattatgttacctaccgaattggcaccacctgatcatatatatgcatataatatatatgttcatcagttcatgcgtggatttatgctaactgtgtgaatacccatctatgttgtaggtgatggttgatcctgatgcacctaaccctagcaatccaactctgagggaatacctccactggtgagcactatatagtagctatagctagctacatcgatctcagttaattatcaatcaatttaattagtgtcaatttttttacattccataaaataaattaaaccgatcattttgcacgcacgtgcatacgcatgcgcggtataagtggctaacccgctaaacccacttataggctaaaataagccacttattttaacctataagtgggttcgcggctgacccacttacagcccccctgtgtgcgcaacaaacggtgcaaatgcagcttgcaacttgcatgcagaaaaaactgtgggtaattgtgtatagtatagatagctagggaccaaatatacacttgtaacaatgcatgctgcacgcgtgtacgtcgatcagctaccgtacaaatgtgcgccatgtcatggatgtacacgcatgcgttgtgtccacgtggtcgatcggtgtgtgcgttagttcatctcgaaccacacaatacatacataaatcgatcgatcgatcgatcgatccgtgatgcagtacagctagatcatatgtatcgggatcgatcaatatgtacatatatggaactctatatatggatctatgtgctaactagctacttatcgatatatgtccatgcgtgtatttgcaggatggtgactgacatcccggcttcaaccgatgctacatatggtacgtacaatatgcaatctctacttaacactagatttatagatcgatgagacatgagatcgagattcgaatagtataatatatactttctctgttggtcaggttaaaataaactgaccaacgttatatataaaatatttaatgaattggcgatatatatgatctgagaggcgcggttgctttgcgatacggatgcagggagggaggtggtgtgctacgagagcccgaacccgacgacggggatccacaggatggtgctggtgctgttccggcagctggggagggagacggtgtacgcgccggcggtgcgccacaacttcaccacccgcgccttcgcccgccgctacaacctcggcgcgcccgtcgccgccgtctacttcaactgccagcgccaggccggctccggcggccggaggttcaccggaccttacacctcccgccgccgccaagcctaattaatcaagctctatagcttaattagctatattacatgcatttataatttgcatgcagtatctatattatatagatcaatgtggtcaacgatcgaataaaaacgtagcatatgatgatatatatatgtacttatatatctatatgtatatgctgcatgctttaagtttaatttgtagctagagctagctgcaatattatccctgttgtgcttggtgtagtttatatatagtgagaggatgtggtgtgcgatatatgtactgttatacatacacttataggttaattatgtgatgtagtaaacgaaatggatcatatatatatatatatatatatatatatatatatatatatatatatatatatatatatatatatatatatgtatatatatatatatatatagacacatacaaacaggtatttttatgtaagatcgatgtgtgtccgtataataataaattaaaacatatatcattcatgcgtgtggtgcgatgctccacgtggtacatgcatggaacatcgtatatactccctccgtctcattttaaatgaaattgtgtgtttatatgtccaacatttgatcgtccatcttatttaaaaagtttatgaaaaaaaaattaagtcgcgtctataaattactattcatgttttatcatctaataataataaaatattaatcataaaagaatttcaaataaaatgaacaatgaaacgttagacacagaaatctacaaccgcacttaaatgggatgaacggagcatcatttttatctttatatagtcattagaaaaaatatccgtgcgttgcaatgggtgaaggctattttattgttcaacgtgaaattcactgtgagaattcatttggatatatatttttttctaaaatatcatgtcaagttaatatgcgagtttttttaaagatatttcttatacgactcattttgtacttctaaaagcgaacggaattataagaatccgactcaaatatgtatggatttttatttctaaaaatgaacaaatttgaaaaccgactcatacacggattgtatgacgtatcaaagtaccggtaaaaacatcttcaatttttataatagtagagatatattctctatttgatatggatatagcacaatttagaaggatcgaatatatgattcaagatatctgattcaattattaagagactaagacgcatttaatttaactttttactcccaatctgtcccagttaaatatgttaatgagaagtggttttttatactcccttagcctcgaaatgtagttatttctggatgtggatatggataagtgcatgttctgtagatagaaatagctactattacattttaagacagagaaaataggggttattttctcttattactatgtctattttttttacatacagagtgagttatatatggataaatataacataaaaaacatagtttagcatataacattataacgttgtaatcactatgttattatttttgttctagaatttttaatgactacttcaccctccctctcttgggcctcattttttcacttatgattatgcttattattagccaaaattgaattttcaactttaaatttggagctgattttgagattttttttcatcaaaatttatttttcagcttttgcttttagatcactaggaacatgtatataaaaattttattcacaaattatttttcttttacaaatatgtcgttttgcttatcccgcgaataagtgaaacaatggctccgaaaacatagctatatatttatggctatgactagatatataagatagctatatattttagaatggattgtatttagatgatatacaaaggataagtgcacgtgttgtaaatcgactttctcagaagagtaagtttatgttgcatgtaaggctaaaatagataagattctgcagtagatagatcaattctgtaaaagatacatatataaaaaggtgcatatccgacatatacctcacgaaaggaaaaggaagggacatatgagggtatatacttcaatgatgagataccaacgtcaaaaaaagtatctcacccactcatctcgacatgatattctgccgctcaaattcttatctccaaaatgagcgaggcttcaatccatttatgctttgagctgacttggtagctagagtaatgcagcaacatatattcatatattcatgcatgtataatgtcctgtgattatatgtggcaccgctcccctccttatagacatcgttatgatgggttttctccttctccaccacatcaatatctatgggtgaaaacctctctccgactttcggatgagcggcagcggtgaatcatatcgcatcctctatgggagagccgcttgagagaaccttcttcgtgcagttgatgccgtgggtgggaccccacattggctcgtggccgattgattgcagtcattggttgttcttcgcattttgcgaccacacttggacgagtggttgatttgcaatgcagttacactctgatgataccttctaattcggttcaatgttgccggcggtgatgtgcaatgtgcgcaagttctcattggtagaaccatcaggcgctaatttcatggagtctgtttttaggtttgaactaggactacatgtagcttgcaggattttcactaattgtggatagtgttgtctctatctttaggatggtgatctaattaatcttctttatgtccatcaaattatattatgtaatgcacagtcattcgagtgcctccccactcccttctccctcgcagccgcacgcgcacactgttataaaaccagcccgatatatacctcgaaaaccgaacgtggaagaaacgccatagaagatctaaacatgaaggcgacactgaggcatgatatttgttaacgaggttcagtcaaaacctacatccccagagcactgattacgagcggtcttccccgatccagcatattacagtgtatccgggtattcacgaccctccatcggctaggccgtcggtcagtcgtatccatacctatgctattgtcgtcttgcggttacaaccaagataaaatctgactcttactctagtccaaacacctattacaactccaagtcctaaattgcaaccgactacgtacacatattcgacacaaaactctaacaaactacaccttggcgaatatgccacgtcaacctgaaattatcccttgcgcgaacatccgtgtaccttgacttgggagggatggggcggtggttaggggatgagcggaggaaatcgtcatcggtggcagtgtggatcggtgcgatgggtagaggcgtatgagcaatgggacgacgactttggtggcggcgaagggagcagggttggaaggtgggcggcaaaaggggagccggcgcgcgtgcgacggagcgcgaagagagtggatgcacgaatgggtggttggagcgcgatacaaggattgggcattttggagtgttgatcttgtgggaggatcttaggaaacaacttagctgtttgattgttcaggactcaccaccaaaaatatcggttttctaagtagcagagatttttagatccatgacttgttaaagtgtattattctgatttcaaattacccgatcttacataacattgacatggtatgtcatacacacattcctatcccatttttttcattattattctctatgtttttgtttttttcccctctttttttatttcttacacacgaagaggaaggaagaagagaaaggggagaaaaaggaaaaataaaaggagaaaaagaatggaaaatttccaaatacccctctaaactttaaatagaagtccgtttaacgccttaaactttaaaaccggacatccaaccctctaaattttgtaaaaccgttcttattactcaaggtggttttgaaaaaagaaaaataaaaggagaaaaagaattagcacccacgtgatatatgacacaagaaaatcgtggcaatttagaattggaataaccttcataataagtttaagtaattggaagatgtattttaataagagttcaaatagaagcccgcgttgaaaatgaaaccgtaagacgtgcaaactcaccgaaaacaaatctcatcgtcgtcgtcgtcatcaccatcgtcatcatcatctgatccccccacgaggcccccagtggtcctgcaccttctccatctccccccacaataataacagcagcagcatccacgactcgataattcccgcaaagcggaagccaaacccaaacaaaccccaacctgcaacccaacgcagacgagtcgtccaagcaaccaccacccgcgcccacctctgctctgctctgctctcctcgccgatggatcgcgcccgcctcgccgtgctctccgcccacctcgcctcccccgccgccgcctgcggggaggcggacgcggcggggccgctggagaggtcggcggcgtctgcgggggcgcgaggcggcgcgctggcggtggtggatgggaggacggggaagaggtacgaggtcaaggtgtcggacgaggggaccgtgcgcgccaccgacttcaagaaggtaggagcgctacgcttactgctggcttcttcgttgccgcgacctgcgccgtgatccgcgccgggttatgtggggggtgttgcgggatttcgggatgcgggttttggttggtggatcaagctggatttctgtggaatcggcttggattaggggattgcgatcttggttgtgctcaattttcgtctgctgctagtgattgggtgacaaaaccgatgtgtaaatttcgcccaatcgccacccccctttggacaaatcttctccctggagatgtcagaaagtcgaaactagcatgattattgagtttagttcctcattatagtgtctgtatggatgtaggtgtggcgatttctaattgttatcctggttgacttcgatgaggtcgcagcttacccgtttgttcacaatgaagttatcctaaatcttctagtgcttgcatgtgacttcgtagttgtagtaaattgttctgcttgattggcaggtacttcttgcgaacaaactagaatgcaactaccgaattattagataactatgcaaatgttacttcactaccttttggtttaggactaaaatttcaagagaatgtgtggacagctcaagctctgtgcatattatgatgcctttgctatatgagatcatcccagagttaaataggattttttttgggttaattgttgcagattaccactggaaaggacgacaagggtcttaagatctatgatcctggttatctcaacacagccccagttcgctcatccatctgctacattgatggggatgagggaattcttcgttacaggggatacccaattgaagagttggctgaaagcagctcatttgttgaggtggcctacctcctgagtaagtgttctgcacctttatttcctctttaatgcaaatgtagtttttgttgttgaaaacatgtttgctcttgcagtgtacggaagtttgcctacccagagccaattggctggatgggaatttgcgatttctcagcactctgctgttccccagggactcttggtatgttttgccatcttattgtgtatcattgcagtatatatggacagcttttctgtttaatttgtactaataactaatggcttggtgttcttttaacgttgacaggatatcatacaagcaatgcctcatgacgctcatcccatgggtgcccttgccagtgcaatgagcacgctttctgtcttccatccggatgcaaaccctgctcttagagtaagcactctctaaatgcactaattgagctagttgtttcttcacatgattttacttaacatgatagaatcagccaaaaattggattttttaatatctgaattatgtatgcaccatctgttatgtgtaatagtttgctgttgttaatgacatatattgtactcgtgtagggtcaagatctttacaagtcgaagcaggttagggataagcagattgtgcgagtacttgggaaggtatgacttaagaaatccgattattcttgtactagtgaagttaatcgaggataatttcccagttaaatgatacaccctctttcttgaattagtgaagtgataaaatagccagagatattctatggaaggtcatgatgcatatcacaatgatgtttctcttttagatttatataatgttatttttccggaaacaagcactgccgggcaaagcccagcagttagctttatatatgtttggttttactaataattgatgcaatattaacttgattttctgtataggcaccaacaattgcagctgcagcgtacttgagattagctggaagacctcctatccttcctacaaatagtctctcttattcagagaacttcttgtatatgctagactctttgtaagtcacatcactttggaattatttgtattctgttctctcatgtgctctttcatttttcttttgttagaaatcaataagcaattcaattttgtgattgacttcattttccttttcgactgtgatgcaggggtgacaaagaatacaagccaaatcctagacttgctagggttctagatatcctttttattctccatgctgaacatgaaatgaactgctctacagctgctgctaggcaccttgcttcaaggtagataatgccattcattctaagaattgggagtctgaccttgcctgattatttatcctgtgtttacagtggtgttgatgtcttcactgctctttctggtgctgttggagctctatatggtccactgcatggtggtgcaaatgaggtaaacaatgctgagcaatgagcagttgtcacttttgtttcttgcattggactgctaatagtttatatacacattcatcatcagaatctaaggatcaagctcacaagtaacaaagacatacagtctatgtactctataaatttgttctgttaacaatgtaaataagtcacctccttgatagagaggtttttattttcttggatttttttatataattgaaaatttagttctaaaacctttgtttcgctttaaccttgactctacatctgttatttttagaagtaattaaggcattactcaattattatgatgcagaagcactaatgccattttctaacatgccaggcggtacttaaaatgttaaatgaaattggaagtgtggagaatattccagatttcatcgagggagtgaaaaacaggtaatatataactcctgtcctgatttatattttctgatctgaaatgtaatcatggaggtcttttttagtttaatgaagtttaagcttttacctttttaaatctatatgtttggacttgtttttatgagatctgttttgttctttaggaagagaaagatgtcaggttttgggcaccgtgtttacaagaattatgatccccgtgctaaagtcatccgaaagctagcagaggaggtcttctctattgtcggacgggatcctcttatcgaggttagttatgctgaatttctttattcaagaagtccagtttatgatgactgtatgtatgtaaccttcattcagttagtgaaatatttggttaatgtttcacattgcaatcaacacccaagaaacagattttgtcaggcactataggatgctaaatgacatgtacttgggaacatgaagcattcatttctaaacagtaggtctacattttatttgcaatgaatgaatatggactttgcacaacacattgagatggatggaatacttctgattagtttctttcttgatctgatcaatgttgaataaacgcaaacagatttattagtcttttactgttcaatccttttcctgtaactagaatataagcgcgtctgttgacgcgctcgttattttgtacctgtgcatattatataaagtgcatttaaatcgaacaactattttataaataataaattcaattcccttaaaatctcataaaaatataggaaataatatacgcttgtgtgaaaaaagtaattacattcatcaaacaggataaaatatacacttcgatttttcttaaaacacatgttttttaaaatatacgcttcatttttttttcttaaaaacacattttttttagaatatgagtttcataaattaaaatgtttcttgtttatatgcactcttaaatcattgttgtttctattttttctaccatgtagcaaattgatagttataacggcgatggtggtggttctgtcaccaccttaccaactgacatgtggggaccataggtccatgggaggaaatggacacaacatatacttttaaccttgtttaaacaaaacagtggacatgatttagaccataatgttttttataacatgtctaattgacttattaagcatgaaaaataaataaataaataatatctttaaagactcctatatctatattgtttgtggttctaaaaccaatgctacaaaataatcactacaaaaaataacttaaaatttaaattttgttatttcttataattaataggcagatgatgttgggtaaaaagttgaaaaatatttttataatcgctaagaaaatccgttacaacgcacaggcccttggctagatatttaaaaatctccttgaacgaaactggctacgctaataatcgttcagaatgattaatttaaacctaaattcatggttctgtattaaaaaataacaactagcctttttagatgccattaatcgtcgtgcttcacatatttcaaagagcaatcatttttattcaggagtctgtaaaattaaaaagacaatcaagatatttattgacagatgtattatttttaaccattcagaaaaaacttttttaatgctattcttgtccttcagaattttgtatatcaatcatatgccgatacatatgaaacattgattgttgctttcagtcagtttcttcatccacatgtactttgcagatttactactgttatcgcagaaagcctttgatatttaatactgcaaagctcaaataaacatgaggttaacaagctatattggcaaaacattaagcacctgttccgtgtagtaattgtgttctacttgcccaagtgctacaatcaatatcatattttggttgctggctttgatcatttgatccatcgtattagaggaatcccaagaactattaggattatattctatcctttccacaatacttgaaatttgattgattaatctggaaagttatttggcaaaaatatcaagcaggctataactagcactcttcgaggattgatggtgtcacatttttgttaactaccctgtgttatcttccaaaccttttcctaatggaacaaaaaactacaataattattttctgttcgtgaagtaggattctgaacaacatggttatctgtgtgcaactgcaataacactttgataaatccaatacacctttgtgatggtttctgatgccatgtcaggttgctgttgcgttggagaaggcagcattgtcagatgattattttgtcaagaggaagctgtatccaaatgtggatttttactctggcttaatatataggtacatcagtgggaaagctgtttttctcttttctctccttttgtcattgagtagctaattgtgattgtgttgattcagggcaatgggattccctacagagttcttccctgttctgtttgcaattcctcgcatggctggttggttagcacattggaaagagtcacttgatgatccagacactaagattatgaggcctcagcaggtcagtgataggcaaacaaatttgccatgtactattatgttcccttagtatgaactccaggtcaatcatgaattatgattactcctttttgagcaacttaacatttagattttcttgtcaatcaatattgagccagattggagccattgttattctgcacagtgactgcggtgatgggaaataaatagttatatgctcttttccttttgaatatcatttggtttggctagctcttctctgggctgcaaacaaggagcgtaggattttcttatgaccacggcatagttatatctttcactaacaaagtccagcagtattcttgatatattgactccttttatacattcatcacttgatactgtgctctctatctagacctttttgggtgtattctgaatgctggccaattaattcctatgtattatatatttgattcatgcgatacataattacagatatggtgttaatcagttagttgactagatatcttgatgatggcttcttctttcttcaggtatacactggtgtttggctgaggcattacacacctgtcagagaacgagtcccagcaagccagggcgaacagcttggtcagattgctacctctaacgcaacaaggcgtcggcgtgcaggttctgccctgtaagatagcttcaaggtacagcatccagcgtacaaaataaaagcaaagcttcatccctgtgctaacaagtctacatatctgcatgaatctgggagctgtaagtcttaagttgtcaagttcacgtatatatgggtaataaactaataatgccacaccagagagcactgaggcgtgcgttgtaatcgtgctcacccaatgtacattttctctttaacttgaattctcccaagcatggagaatgaaaggatatctctgggcagaaactatgaaaatgcaaaatttgaagaagattttccagttcagtcgatcatatcaatatgccatcaagtttattggttgcattacaggaggcaaacttgcatggtcaatttcttgctcgttcttgagaaatcagaaactgccggttgtttcagtggatggtgaatcttaactgttactgtctactataattgccgtttttgtcatgactcattaaccacatggttttaaattcttatctaatcacctcttttctctttcctttgttttaattcttgatttttgtgtagagatatttcttgtatgagaaatagtttcatctttttacctcttttctcattaactttcttgctatattagatttttgcttatgtgatagtggatttaatgttatgaacactagctgagattgagggttggggccttaagcccaagcacaaaatgcattgcatcattttcagttcaccattcgtcactaaactaatccttgtcaggttgtggcatgtcactgtctgcattggcctagatatttcacacgtaggaactatacacatgcgttgttctattgctagtcatgatggcattttttggtcagattattacttgtcttcattcatgtggaccttatcatcaagcttaggtagggcccttcactgcactgcctacctaagtgtctccatccttccattccttgctgcatgttgatcagaacggtttaaactgcaatcatgtgctcatgtgctggtgggtcatctcatttacatctccttttggagttcttcctctttgttaattgtggttggttcttgcatttacggctggtaagtttccatgttcatagcggtggaacatgacctggaattttccaaggaagcatcttaaaaaaaagcattgccactaatgccctatcgcctaatctcatgcctatgcacgttttataggacttatttagtggtcagctaattacttaacattatctgaaaaataaacttgtcaagttggactactcctaagcaaaatcgaccaaaacaacttccatttgcggatttacatattactcaaaattagactttagtagactactagaagatcgatcttagcatgcgtcagaaagtccttgataattatgaatcggcctgctacctgctaacaaccaagatcatttaccatcaacatcaaccattcatagttgcttcctcagtggtgtgcgatgacttaatagcttgcatcctgtactataccactgctaatccatgcagatgaccaggtcagcagcaaacagaccagccaaagaaagtcagagtcagagagcacaacttgtcattgacaaaccatccatgccatgccagagtggactgttgtgttcttgacaacagcctctaatttatgtccaacaacagatttgaagttgatctttgttgaccagttgcaagatgtatagataatctactagtaatggtggatttgacacatcataagttgatccaaatcacctgctttcactggctagtactagtagagagtttgcaactattggttggtcatcatgcatggcatgagctcacatcattcctaagcaaagtggttttcagtccaatttcaccatcagggaagaagaaattaagatcaccttccaaccatatgcatgctaccagtagcatcaattgctgatctttaggaaaggtttggatcctcttttttcatcttttggaactaggaaagagaagtggcacttggctagcagtggcgtttggttctttgcacaaagagagttcctgtggactgaaatgtcaaacatcaaactaggtatccactttaattagtccaagtagatgaaggggaatggcatgtttttagccaagccagtagtagaatcacatgcttgggttgactggtgccacagctgatcaatacagtttttggctccattacatgcactgtatgtctgtatctggcagaatgaagtggatggtaatctaccacaggttgagagaggttacacggaagatgcacaagcatgcatactactaggtgagatcggacggtggacagtagcgatgactgataggtaattaactggaagcatagggatttttttgcaaaaattacactcctaatctccaatgtgcgggggctaatttgcaaaaggaaccgctgaagtggcatcctaattcttcaaggatcccacgcggtttaaagaagctaatgaaaaatgttttgagccgaagctctattttctatggaccaagcaatgcagtcagatacgtacatgtgctcaaaaccgttggaaggcgtgcaaggttaactagcaggggttggctatcggggtcacgtgggataggttaaactctgtttttaagatgtgacggcctcgtacattcgtttggcacgaggaatgaaatgatcctaatgatcctacttttaaaaagatatcttatatatcagccagataaaaaaatggtttggaatagtccatcaatttaatccgaatcttgagggaatattctcctgagatcatccttcagagatgatagagagaatagtgggttagatttatccgtcagttctaataatattttctatgagataccatcccatcccacttatccttaagccaaatactcgaaaaaatagattctaacctaacccaacctatctcatcccttaaaccaatactttagatctatcaaaatgtgtgactcctactacctccatcccttagtataagggatattcactattttcttgtaacgtttgactactcatcttattcgaaaaaatttgtgcaaatataaaaactaaaaagttgtgctcaaaatactttggataataaagtaagtcacaaataaaataaataataattctaattttctttaaataagacgaatgatcaaacagtgcaaataaaatattaaaatcctttatattagaaaacggatggagtatattttatcaagcctaaaaaaatcaaaggttgtactctaagattggatcgtcgacaaaaggaagatggagtctagcctcgatgtggtttgggaaaccttcggagatatcatctctttggtttttttgtcttttctaaattatttattctatgttttcaaaacatgtgctatcataacactttttactgtaatacgtacgaccatttgtttggattatttattaaaattttaaaaatatttaatttatctctccagtctgtctaataatcaaaatcaaaccagaccagaccgtacttaacggtatcaatatgtaaactagtactatatccgtcctaaaatacttgtcgttttgagtttttctttctaatatttgatcatttgtcttattcaaaaaattatagaattattatttattttgtttgtgatttgctttattattaaaatattttaagtatgacttattttttttataattatactaattttttaaataagatgaatgattaaatattaaaataaaaaaaatcaaaatgtctaataatttgggacggagacactagtattctcgttgttaataaataaaaagaaagacaagttgaccggacgtagaaactgtacagtagaaagaaattccgtactactcctacttcttatccgcgaacaaaaaaaaaaaaacacacgatcagcagcagtgtcagcgcgcattaagcgttaatcccccagctggtcaaaaacccgagcctgctgcgatatggcctaccgccgctgcgccgcacaaccacaacccatacgcaactccacccaaaaaccagcgtcgcatcgcacgcgcaagcgcagcacgagcacagtgaggaggagcttagcttagcctagctagcttagctctaccaaaagctctctgtagcttgcttgctgcccagtattgggaggggccgaagggcaatggtgggaggcagccgtctgttcctcctcctcctcctacctttgctgctgctgctgctgggcgccggctgcagagatggccgccggtgcgccgccgcggccgcgcagactcagaggctgccgcagcaagaaggtgagttgcgtacggcggcggcggcagctagctagctttcctctcagattttgctcttcttcttgttttgttttttggttgttgttgctaatttctttgttaattagaattaattactgtagtaagcatgcgcctaagtgtgttttcgcttagctaagcttgagctttgtcttgagattcttgtggatttttttgctgctcccaatctgtcattgcaaccgcaactacaaatcgatcgatggcctccacacgctggtagttgatttttattttactacttcgtatttacaactagcagcctctaccaatccccggaaacaagaataataaaaaaatgtttgtttattttgatctggagataaactgccaaagatttcccttttctttaccgctgattttggcgtctcaagatcatctgcaaaattcacccagatcgcccggaagggcactcaggcatttcttctgctctgccgcatcagatccatcagtgctgctcacttggggggcaatgcctcaagaactcgtacagtcgtacaccgtgcaaaatggcgaaatgccatttttcttcttttcttattgcgcctgtgatcctcgggtgaactgtgttcaggacgcatggagttcgtgccgaattgttgcttctctcaggacgtttctaaaaaattctctcatccagcttaagtgcaaatatatagcattccctgaatcattcagggttgaaatgcaaattggtattcctttaggggcataagagcaaatagcatcgccatttttcgccttttcggttattcccccaccaaaattgtttcctccaagggcccccaagataagggcaagctgtgcgatcttgtcgatggcgaatctgagcaggaagttgttttggcttttgagttttgacttggccgctctcttcgtcttgaagatcccatcttgcgccagagctgcgggttaggcatatgcagtggtgaacagattgatctagtccaatgggtgctgcacgccaactgtttgatgaaattgctgagtacccagggtgcacgccgggcaacttcctaggagtgccaaagttggctcggtgcgctggcaggagacgttggctgctttggcttggctttatgtgcaatacaaaccatggtgacaatgtgttgtatgcatctcatgacattacgacaatatgttgcctggtgattgtattgagttggtaacagcgatggtttcgcaaagccttcctcttgcaaggaatgatgaaccggagaatggcagtgcacaatgctccgcgcttgcaatttttcggaggtttagttgctagagcgcaatgagtcatgggcttgagctgatgggtgagttgtgcaaagccatggcctactgtgcatatatgcgctacaagaaattgggcacttgagggaaagaaatggcatgtttgatagctcaatgactcaaagttaatgtcatggccatggcctatgctggtagctatgtgtggagagaaataatttatgaatgtctcacttcacttgctaacgaggataaatatggagttctgggaggctgctaccatcaaacatgaggcttttgtgccaacattttagtttttttactctctaagcaaatgagaattgcaataccaaacttccttttatccactgcttgataggttctctagctcactcattatgcattgttccgtggctttgtactgtttaagtcacaaattttgacaatttgaccctttctgaaaactaattttacaaatgaaccgcggccaaaacttatttcagaaatgacccttttgttcggcgccaaatcgtatggcgctgaacttagacacctcagcgccacgtcaactggcgctgaatgctgtgccaccgcggatgagaggctgagtcggcgtgccaacgtgcatttaacgccgtgctatttggcgctgaggtgtctaagttcagcgccatacgatttagcgttgaacaaaagggtcatttttgaaataagttttggccgcggttcatttgtaaaattagttttcggaaagggtcaaattgtcaaaatttgtgtgtttaagttgtatattgcaacattttgaaattctcatgcgggaacacttgatacttgccttgttggtgctggtgatttctatttgtttcttttgagggaagcaaacaaacaacattgtattgagactgctgagttcttacatgctaacagaaatacaagctaaaatttcaattgccttttcttttgcagttgaagcacttaagggaatagcacgcaagcttaacaagatggattgggacttcagtgtggatccatgcactgggtctaaaacttgggttaatgccagtgattccaatagttacccaaaatctagttatcctaattttccagtcagcaatctgacatgtgattgttcattcaagaacaacacagagtgtcatgttatcagcttgtaaggataatacctattattccacttcttttattgctctagagtggttcttatccagaatagttcaactgtttcagtgtctttcgttgttcactaaaatgttttttttattctttgttcatgcacatggcagggaacttatgcgtcagaatcttagtggagttctacctgaagaagttgtcaacctcacttatttgacaaatctgtaagtgcttccatccagctacttaaatttaagaacattcaccagcattcataaataaaagtctcactttccctgcagtgacttatcacgcaatttcatccaaggaccaattccagcatcatgggctagcctacctgtttttaatctgtatgttttgcatgatcctacatcatatcgtcagaatgcctgtaagtagtcatttgttcaactttctagtgcaattacaggtctctccagggaaatcgcatatctggaacagtacctaaggagcttggacgcatgcccttcttgaaatctatgtgagttgtggttgcacgatgattacaagcacctggagcttgctgggctgaaagtgtatactaaaatatggcaacatatcctatgcatagaagctcttacgtatacacacgtgcacaccaactaacaaatgtcaccaaaaaatataaaaaaaatcatacatgtactttcaatagtattacacataatggtaaaatcttaacctcaaattcattatattttagccgtaacaaaaaagaacatctgacagttttaaggttgtaattctgtcagaattttatcttttttgttactctctattggaagatgtgactttgcgcgtagatgtaatactattggaagtacatgtatgaatttttctagaattttttgtgataatttttagttggtgtacacggtgtgtacacgcgagggcctatgtccataggatatgctcccctaaaatattagaggaactaacttttgaacctcaaccatttgcatgcagaaatctagaaggcaatcagcttgagggtcatattccaccagaattcggtaacatcatcagtttggagagattgtaagttcctgtactgatacctttatataattatttacatcctcattgctaaggaggttcacttgtcttgcgttgttgtttaagacatatacttatgttgttaccgggaatggaaattcaaataaccagacttctttatttaaagttaaatttgcaacgactttgaaaactagcatgaatgtgataagtaaccatacctaattagcattaatacatcgttgctgttcaattgttcccattacagtttatatactgttaattagaataacacgatgccatgttttgaatgattttttttctccttcagatgctgataacttttatcaattaaagaaacatgaatatgccttgaaaacgaagtttctcattatttttccactaaggctgtctaaagtttcttgaattattactcattttcctcttacagtttcatttctgcaaatgacatcacaggagagttgccttcaaccttttccaggctcacaaatatgacagatttgtatgtcccacccttatttcaagaaaatcttttcttgactaggaagttctaatttttgttgtaatttggaacaatttcagccgaattgacgggaccaatatctcaggaagaatacccagtttcataaaaaattggcaacgggtcaacagaatgttagtttcactctgatgtagaacatttcacgagttgcagttgaaatggatgaaaatgacttttgttcaatgttctaatttcgtttaaatcttctctcttgatttttcagagacatgcagggtaccttgatgagtgggcctattcctccagaaatttctttgttgaacaacttaacagaactgtatgaatgtttcatacctatgctttattattttaccactgagtcacaactgatgtttttaacaatatatcttgtaaccattacataatcaggagagtgactgatttgagtggaccgagcatgaaatttcctcccttacaaaatgcacagcaccttacaaaagtgtaagtttatctttcagtgatttttactagcttacattagtacttccagcagagaacggcattgtagcccggtggtatgggagcttccaggtgctcttgctgggcagagttcgagtccctcctcagctctggttttctcaccatttcttctctcttaataattgatgctaagttccttcttagtatcccacattgagtgtccgttcaaaaacactagtacttccagcacaatatggaattctcaccatttcttgttcaaaaacactagtacttccagcacaatatgaaattctcaccatttcttctctcttaaaaattgatgctaagttccatcttagtatccttttgggtgtttgttcaaaaacattagtacttccagcacaatattaaattctcttatgttacagggtcctaagaaactgctccatatatggtgaaataccaccttaccttggacagatgcagtatctaatactcatgtaagtatccagccattattttgcttcaaccattaccttttagagtgaactttcttgttcatatggttatggtttttctgtttgcatcatcatgggtgagacgagaaaagtcagttgttagaattggaaatgtcatggtttattattctaatatgaaatatgggtgtcttttactgcatgcgttggacaagggtgtcttttaccattatctatttcacttgtttttgttgcactattagggggtaatagtattaaggggtaatcttggcataacctattgtctccttttacactgaatgctgataattacaaatacttgtttctctgacatgctaactcattctctactataggatgttgtataagttttactgttcattgaagctaacatatgtggccacacaaagccctggtgttttgctcaatgccatgattacaatctgtattaatttcagggatctaagcttcaacaagttgactggtcaaattccacaaaattttgacagaatggtggcactacaactacaatatttgtgagattaaatccttgagattttactttatgtgtcaacattttttgtttgattttggacaaaataaagtgtagaattctctccaacattggtggttttgtttattgcttttggaaggcgcctcatttcaattactataaataggtacttaagtgacaacatgctgactggagatttgcctggttggatgttgaaaaacaaggcaagcaacaaagtaaacatgtgcgtatgctataatgcaatactcttctgtgcacatacatatatgctctctactggtcactcttgtttactttttatagaatgaaaatcagttgtatatgtcactttctgttttggtgatatgttcttggataacaactgatgaatgcttgcagggatgtgtcgtttaataacttcacgggtaaccctccaaatgaatgtcaacaagcaaacgtgtatgctgctcatttgaactttgcatagaatgagctttttttttcatgatgttgaaatgccttgcatgttgtaattgcagaaatatggtttcaagtttttcatcctcaaatgacaatctgtaagatcacacactgaaatttcaatataatatattttcatatcaaatatccatataagaaaataagtattaaggggtttatgattttttgttttgcaagtttgcaaccatgtttacgaaagaatcttccctgcatggacaaaccacgctgtaagtttcttatgcaatggagatgggacatgacatcagtcttatattcagatttgagtttaaaattttaagtgtaaaatggtactaaaaaattccttcaaatatcttcagattcctccctatttattaactgtggtggcaaaagtgttgaggtcaatgggaatatttatgaggatgactcatctcgaataggaacatcaacttttgttttatcaaatgacagaaaatgggcctatagtagtacaggagattttgtgggtaatccagatgctgattacattgctagaaacacatcagaactcacactggatcaccctgagttatacactgaagctcgcctctcacccctctcactgaaatactatggagtctgcatggaaaatggtgaatattctgtagaacttcattttgctgagattgtgtttacagaagatcatactttttccagcaatggcaagcgcatttttgatgtttttatccaggtaccattcccttaatctgtaggatttgccattttcctttatgtcataatcttgctggcatcttaattctttgctactcttagtttataccacttgtcttacttcattattaaaaaaactatcagaaattttgtgttgaaaagccatcattatatttggagaattcatattttgtctggagcaaatgattgtcctactaacaaaaaggatcaacaacaattgcttgctgcctaggggaacagttgtctcagttatagaattcttacttcattcttaataactatcagaaattttgcatggaaaagctatcattatatttggagaatttatatattatctggagcaaatgattgtcctactaacaaaaaagatcaataacaactgcttgctgcctggggaacagttgtctcagttatagaatttaccatgtttagtggcagtttcttggtcgccccttggtgtttagctcaggcgcttttatgtttccttcgttgagagttgtgtgaagttgtgtgagttgtgtgtggtgtgtgttgtagggctctagccccttttctctcttcttaatttaatgaggcgtagttctcctgcgtttttcgagaaaaaaaagaatttaccatgttttaatgtttgaaaaattccaaaacagaatcatgaatgcacacagagttgtgcaaatccacaaaatccaatttcaaatccattatttgtattaagaagcgacaaagatgaaaattggataatctgaaatcgtcagcaacccaagtggatataaaattatgaataaaatatggaagtttcttttcttggttactttattttttgttggtgtaagttatttcctgctcaaatgatttcttgggcacctgtcctcactttcttgaatataccatgcattatttaattcttgttaaagtagcatcatacaaatatggattactgttctcttaagacattattaactaagatttgcaataatctgccagggtactaaagttttgaaggattttaacattcaagatgaggctggtggtgtccatcgtgtaattacaaaaactttcacaaccaacatcacagataatacattggaaattcacttctactgggcaggcaaaggtaccacaggtgttcctgaccggggtgtgtatggtccattgatctcagctatatctgtgatacaatgtaagttctttgcactcccaactaaactgtcttctttccaacattttacatgtgcttttcaagctctctaattacgcatggatactgtttaatcatatcttctcatatgcttggaaattagctaactgtagtacttgtacagtaaacaggaaccatcatggaatctctactggattgatgattactataatagtagcagcatgtttgattgtcatacttgcgctaattctttgctatatcaaattcttccggaaaaagaatctgaaaggaaatggtaagttgatattcattttctaccttgtcctacatactatatgaatgtatgttatcttctctgtctggtttagcatgcttgtcattgattctaaactatgaaattcataaaacccctaggttttggccttttggggaatttgtagcgtaaaaccttaggttttcccatgtataaagcaacccaggtttttgggcaaaatgttcaacaaaaccagatttatgcaaagtacacatattcttataatgtgtggtattttcaaaagcatatactctattcgttgagaaaatgcctaatgtttctatgcacacaaaatactgcataatatttttgtccaaatattatgcacaaatactataccatgggaattagatgatgtaggatgtacctgggttttatgaagcatttccccccaattcatggggttcttcgaagcaaattgcaaaacttacgaatgccccaaaacctgggatgtgaaatttactaattttgaattcaagtatcagcccgtaaacttattattgaagcaaccaacttgagcaacataaaccaaaattgtgttaattcattacataaggaccaaggggatgctatcctttttctggctgtattatgcagttgaaagtttataactatctctaaactagaagaatgtcaataaaaaaaaattgatatgctcgtcagctaatattgacgacagacatccaaaatacactagtgtttctaccttctagttttaatattttactgtgcatcacaggtttacaattcttttaccatggaaggaagaccgatacttcagatcttcagacacggacacagtacttctttagcttaaaagaaattgaatctgcaacgaaaaattttgatcctgcaaataaaattggtgagggtggctttggacctgtttacaaggtaaaaactgtgaacttaaggttttctcccttaaggtgttagaatacagaaaatttactttgtattcatgacatcactgcatatggtatacacattttgggtgtgtttggataatgggaaatggggggtggtattgggaatgggaaatgaatgaagggttaagattaaatggaaaaggagaaatgaatggttaggatttaaagatgtcttttggtgggtgggaaatcatttcccctatcccattagccaaacactgcctttgggataagtaattcactgccactgcaacatactcagatgatcgaacataataactaagaaacatataaataataataaaggtgaatcgaccagcactcagatgtaataaactaacagtaggcattttaattcagtacctctttcattcctttctgagttgtaacacactgttaaccaatcttctatcttcagggtacactagccaatggtactacagttgctgttaagaaactctcttcccagtcgagccaagggaatcgtgagtttttaaatgaaataggaataatatctgccctaaggcatcctaaccttgtaaggctctttggttgttgtattgatggagaacagctactgctgatatacgagttattggaaaacaatagtcttggtcgtgcactttttggtaagactacataaattcagatgatatttccaaactggttttcctgccccaaaatgaatttccctacaattatctagttcaacgctcatcgtagttggtaagagcattctattctaatagtgtaccaatttttaggacgtggagatcatcaattgaaactagactggccaaaacgatataatatctgccttggaacagcaaaaggcttgtgctatctccatgaagaatcaacattgaaaatcatccatagagatattaaaccatcaaatattcttcttgatgaaagactgcaaccgaaaatatctgattttggtttggctaaactgaatgatgaccgtgggcgtatgagcactcggatagctggaacagtgtaagctgtcattctatatttttattggctacttcacctttcattttctattattgtatattgtaaaaatctttattatccaacatctgataccgttctttatttgaaccagtggatacatggcacctgagtatgccacgagaggttgcttgacatgtaaagcagatgtatacagttttggagtggtgacattagagattgttagtggaatgagcaatacaagtagcatgtcagatgacgaatatctccatcttcttgactgggtatgctattttagcttctttttttctgttactgcttttgtcttttaggactcgaattcataaccagccgtccagccccatagaattgggtatgatcttatgggacgaatttctgtcatagatatgttatcttttataaagtcagtttgcttaactttggagagctctgtcacattttaggctgataatatgctgagtaattgatgatttggattggctgttcaaaattatgttatgataggaataaaggtcaattgtaacataaaccaacaacattagttccaaaaatcgatcatttgaatggcagctattctgctatagccaatgaaataagaccaagtttcttggtactcacccaacggataacaatggataatcagtctgtctagtagctactgagattctgtcaaacaaaggctaacaatgaactaggtgtgcccataaacaattttctcttgatcaggattagcccacaaacaaaccaatattcttcatgccagaagaaagaattgcctagtgctaactgaaagtgtttcacatctgaaaggcgaattacccaagaaatttagccttgcattgcatgttaatatcaccaagtaaactgctgatagtcctgctacacattttaaacacgaatctactaactggatttattttctgcccacaggctgaaagattgaagcaggaagggagactactggaaatcgttgaccagcgtcttggttctcactactctcaagaagaagcacttaggatgctcaatgtagctcttctatgcacaaacacatcacctgttcagaggccaagaatgtcttcggtggtgagcatgctctgtggccaagcccctctagaggttgtacctgatgaagatttgagtggatacatcaggcccagttactcccaatccaatcaatccatgaacaacagcctaacggagtggtcctacgcgccatcgagcgatccttcgatcttgctgcagaacagtatggagagtggttacctcccatcttcaagctccccttcttcaaagctgtgagctgcagcaccaggattagctaggatgaaatgttggcaattgttttgagcccaatgcagcaactgtacatatgcatatgcatttgctctgtctgtaatcccctgtagtttggcattctgtcagttgtcctcagccttctcatccatggcatatgacaattgatatcaatgatgcattgccatgatgatatattcttcacaaggggactggaagcagatattggaatctgatgctgctgatgtgatggtacatatgaattgagcaacttctcaggggcaccacttgagtttcttgtttgttagccttggtcatcatgtatctagtaaatgcaatgtacaactaatctgtgcaaatgtggatatctagtaagttttttttttcttttcttttctagctaggaaggttattgtttggtgggcaagtagagaagacatgtaacataataacagttcagtgcaaactagtttctgcccttgttaacttaaaaaagaaggaaaaagtacactcaaggtccctcaacttgtcatcgagttacaataccgtcctcgaaccgcaaaaccggatatgatgtatcctccaacttaaaaaaccagtgcaaactaggtctctggacggttttcactccggttttgtcctatgtaggagctgactcagcatgggacccatgtgggccccacgcatcagccacttcttccctcccctctccacctctctttctctctctcctatcttttccaaactgcacgggcggcggccggcgggcgcaggcggcgtggggaggagctgcgtgcgggcggcgagcggcggaggctgggcgggcgggcggcggccggcgggggaggagctaggcggcggtgcacgagctcctcgccggacgaacgctagaccggctccgccatgtcggccgcgaggaggtggcgcgcctcgtcggctcgctcagccggagtgccgccgccgacgttaacgcaaatgacctgagaatttgagatcattgccatcttgctgttctccttcaagccctatcaacaagattgacacgattaagcactggatcgagatatgatcgatcgagcagcaccgacgaactagccgccgatcatagagtcaaatgctcacatctcaaaagcttcaatccacgtggacgaatcaatccattaaacttgtacgcatgcacatcacgcacgaacaccacaagaggacatgaagcttcacctgcaaatctctctataaatacatggcaaaaccatcaacctagctagcatacagcaacttacacatgggcctcgtgcatgcactcctccccttagcaggagctgctcctcgctacgccgccgccagcgacggccgacgacccgggcctcgtcgtctactggggccgccacaaggaggaaggctccctgagaaaggcctgcgacaccggccactacaccaccgtcatcatcaccttctacaacgtcttcggctacggccgctactcgctcgacatatccggccacccgcttgccgccgtcggtgccgacattgatcaagcactgccagtccaggggcatcaccgtgctcctctccatcggcggccagggcggcggctactccctccccaccaacgcctccgccgccgacgtcgccgacaacctgatctggaacgcctacctaggcggccaccgcgccggcgtgcaccgccccttcggcgacgacgcggcggtggacggcattgacttcttcattgaccagggcggcgcctaccactacgacgacctcgcccggctgctcaacggctacaacaagtattatgatgacctcgcactgcaggtttaacgtgctggtgagctccgccgtctcggcgaccacgctccacatctcctccgtgtcattgtcgtcgccggcggccggcccatcaccaattcaccatgcgagagacgatgtcgctggtgaggcccatcagcgcggcgtcggcgtcgacgtgctcgccgttggcggcactccgactgagcgagccgacgaggcgcgccacctcctcgcggccgacgtggcggagccggtctagcgttcgtccggcgaggagctcgtgcaccgccgcccgccgcctgccgcctgccgcccgcgcgcggctcctccccacgccgcctgcgcccgccggccgccgcccgtgcagctactccccgcgcgccgcccgtggagattggaaaagagaggagagaggaagagaggtggagaggggagggaagaagaggctgacgcatggggcccacgtgggttccacgctgagtcagctgccacatgggataaaaccggactcaaaaccgtcttgggacctagtttacactggttttgtaagttgagggatgcgttatatccggttttgtggttcgaggaccgatattgtaactcgatgacaagttgagggaccttgggtgtactttttccaaaaagaagtcatgttttgttcattggaagttcattttggtggggattgggcctggatttgggctccctaaagtctctctggatcactggatgggtcttagccttggtccatccacgcccatccaaacaagagcctaacacaaattaaagcccatccaaactcactgaacctgaaattgatcttatgaaaccaaaatcggagatgtgaaacattcagcagcactgcttgattttctacctttctacacgggtttctatttaagcaccatgaatccgtgagaatatatactgtcaaagaccatgcaagatctaatcaattttaacatctttcaactattgctaccacatatcatagatttcttcgaaatgctactgctcctagtccaagaaaagacaccacatcaaagccaaatgcagaaatgctagcaaaaggctcattttataagtaattccggtacgctttttttccaagcacaccggttgaccatggttccatttcattggtactattttttctcctcgattacatggaagacacatgtcttttgtcacttgctatgtacatggccaaattaagctcattccctatttcaaacaaaattaagttcccttcttatttcaaacatgtccttttttttcttgataatttagatgtcgaaatactgaacttcataagcatggatagaggggggaacttatcatactcacctatttaaaagaaaaccataatctgcaaggaaacactctgcaattttatcacgtggtccaaaacatactattccacacacacatatacatagattttttaagttctacatatataggaggcagagaagttccacacgaattttataggaatccccacatctaaaaacacacatcacagaattcctataaaattcctgcgttacaaaggaggccttgtggcacgtagccgagacgacaacgaactaacgctaattaaattactactatatatgtgtacgtcacaaatagtagttcatccatctcttcccttttaaatgcgatgcggtgcatcgatcaagcatctcgatatcgatctcgaacagaaagtagcagtagtagtactggcagtagtaattaattagggttcttggtggttagctagatagaggttaggtggaggagttcatccggttcatgctcttgaggaaggagccgctcttggtgatctcccggaggggcttgttggtgaagcggatgatgttgtaggcccaagctccggccaccgcgccggcgaccggcccgacgatgtacacccagatcgacctgtactcgccgccgatcatcgccggccccaggctccgagccgggttcatcgatgctcccgagatcggcctgaacagaaaatgcacatgtcatcaatctctgatttttttttttgaaaaagaattatctgaatctctgaatctctcatcccaaatctttattagggcttgttgatcattattgtccaatataaaatgatgctggttaaaggtaggtaaaagggtacaaatgaattttcttcaacaaaacacaaaaactctgtttcagctttttttacggactctaattaatctcaattatggacatttgtttataagaattgactaaacattatttatacattaattgaaaaaaaatagataagaacaagttatctaagccttagtgaaattgtgaaaagaagaaattgtagtttgagaaccgtgtaacaaaaatctacaaattcataaggtttaagtcgtagacccgagtgttcggtacaattccaacttcacgggataaaaatcttacgggctgtttggatgggactaaaattttttagttcctttcacatcacatgtttggacactaattagaagtattaaacgtagactaataacaaaacctattccataaccctggattaatttcgcgagtacgagctgtatcaaacggggtccatagtatcatgtcacaactatggttgtgtttagttacacgttaaaattgaaggtttgaaaaaattagaacgatgcgacgaaaaagttaaaagtttgaagagaaaaggtagaatctaaatagggcctgtatcaaacggtgagttattgagaggcaggcaccatgggtgaggagtgaagtggagtggagagtgtgaatttacaagctaggcggccggaggtaggaggagtaattaagttgacattaatgcttggttgcagtgcagtgcatggccgatcttcactgcaccaaccgcagcacactcaaagccctgcgctccacatgaccgaatttattggttggctttggctccttcaaaacgcactctccctaccgaaaaggacgcatacatctgatctagtctgaactctgaatctgacccattgttttcttaattttgactggaaattatatactactactactactatggcctggtttggtttagtttctaactttttctacaaactttcaacttttccatcacattaaaacttttctactcacacaaacttccaacttttccgtcacatcgttccaatttcaactaaacttctaattttgatatgaactaaacacaccctatatgtttcatgggcatggaaagaagtggatcgataccaacacattttcagcctctagatcctctttgaaatactttccattgtgaagagtaattaattaattatcatcatgagagagatgatgcgtgaaagaaagaaaaattaaaacgtacccagcaatcagcacgttaagcaggatggttgcaccaacggccagccctgccagctccccgatctgcatccatgcatatggtcaacagaattatcacttcaaaactttcagattaatcaggatcaaatcgatcctaattagtggagcaatcaaattacagatatatagaaactaattaaactagataattaattagcggagggagcaattaaattaaatgaattaaaatcgtgctaggtagcttacggctcggttgtcggtggcgacgccggagatgacgaacatgaggtagaaggtgatgatgaactcgaggacgagcgactgcacgtcggagccggcggggagcgtgccggggaagtgctcgtggcggccgccgaacatgagccggagcgtgccggcggcgagggtggcgcccagcatctgcgccgccgcgtacgccggcacctgccgccaagggaacctccggcacgtcgcgaacgccagcgtcaccgcggggttgaagtgcgcgccggagatgtgccccacggcgtacaccatcaccatcaccgccagcccccacacgatcgccacccccgggaacgtgatctgcccgttcttgctctggttgatcgtcaccgccccgcaccccgcgaagatcaagaagtatgtcccaaagatctccgcgatgatctacaccatgatcgatcaatgcgcgcgcccgccattgtcaagatcaagaactctcaagatcaggaggaagaagaagacatgaaatgatgatcaccttctggatgaaagggacggagaaggcgaggccgcagccctggccgtcggcggcgaactcctcctgcttcctgccttcctccatggctctctgctcgtgacctgagccgccattggtggtctgggagttgttgtcacctcctgccatctctctctctctctctctctctctctctctctctctacagatgcaggtgagtagagaaagaagaagaagaagaaggatacaactgcaatggcaatggattcgccgatgacccgggctcctatttattggcgccaagcaagctaagatctctctctctttctctctccttccatggcagcagctgatgctgctactgcggatagtaatcactttccaagccgtttggattgaccgagcccactttaatctcctggttgttggtgtgctccgttaactgctggtgattatccatttaatttaatcgtgatcagggattaattgattagtatctgtttggtttgtttggcgtgtcaaaaaagaggattatctgttggtccaatgagaggccgaagggagtaacaaaattgggattcaaagcccacctacccaccagtggcagagtcgacaatcaagtgaaactcttcacaaatgttttactggaggcacagttgatggaagaccgtcagaaagtatggctaatcgacaagcccgggaatcccctggcaaaattttcatcatgtcatattgaatgtttgacatatttatagagtattaaatataaacgaaaaaataactaattacataaattacgtgtaaattgtgagacgaaccttttaagcccaattgctccatgattaatttgacaatgtggtgctacagtaaacatttgctaatgacagattaattaggcttaataaatttgtctcacagtttacagtcggaatctgtaatttgttttattattagaccctgtttagatggggctaaaacttttaagtccctatcacatcggatgtttggacactaattataaatattaaacgtagactattaataaaacccatccataatcttggactaattcgcgagacgaatctattgagactaattaatccatgattagcctatgtgatgctacagtaaacattctctaattatggattaattaggcttaaaaaaattgtctcacaaattagctttcatttatgtaattagttttgtaagtagtctatatttaatactctaaattagtgtctaaatacagagactaaagttaagtccctggatccaaacaccaccttagtctacgtttaatactttaaatatgtgtccgtatatctgacgtaacacgctaaaactttacacacatcatgccatcatggatctaaacatccccatagtactgaatagttgagtaaattcccaaactatatataactttttttctataaaaatataaagaaaactattactcccccatccaagtataaggttttttctgatccaaattttataccatagtttaagaggattattgtaatgatttccatggttcccattattttcaatgatgcttggaaaggaaatatgaacaatataaaatttatgattaatatctgaagtgactaaaatggaatctctcgagctaaccttaatattggctaaacaacttataaatctttatatttttggaacagagagagtaaattattttcttttcaaaaaatacacatgtacacccacgacaatagatttgtgcctacattgcatgcatatattctttaatggataattttaccattcttgagaaggtaccgggaggtactatattttttatttctagtataaaatttggtacctctaggtagtaagtatcttgaggtaccaaaattttagtataaaatcttggtacctccaggtactttctcaataactataaaatttctctcctttaataatacagtacaccctttcaaagtaggctcaagaaacagaaggcaacgataaataatccatgaccaaaaactacaatattgtcagctatgcatgaaagtcatgacaaatagactcatcgattggggaagagtcctactgcgatgctcccccataaatgaaccattgatcacatttaatcaaaagattcagatctatttatactatcattctagttagcagcagtggaaacgtagaggggcatcattgtaaagaaaaagtgcgaatgaatataatcctcaattagcagtaactaaactttttttccttctttcttttttggctttttggtagaatatgagcgatgccaacacaatggatgaccacatatcgatctgggcagggaaaaacctaaatggcaaagttaccaatcatcattatactagtaaattaccgatatacccttaataacgaatggtaccggtagagagcaccggtgcatcactcatcgggaaaaacattagcgatgtaggggtggaatcgtgggtacatgactccaaccgctaggattcaaatcctagtacccacgaatattgtacatatgcaggtgtgcttttaacggaattttagtaaaatcatggatgtgctgatttcagtctctttgagagtgtgctaaaagacgcattcgtgggtgtgtgagtgtggatgttgcgtgtatagtggtgtttgtgcgtgtgcgtctgcagtgtaatcgaaaaaaaaaaactcatcgatcattcacactagtggagtgtaccagataaattttcgtcgatctccgacaattttttgccattctaattaattttcaagatgggattgaagagtgttgagatacccagaaggatatgatcgtacggcagaaaaagcatggccaatgaaaaaaaaaacgagcttttgtgttggacaaataatgcacggccatggctctgtgaatcctcttgtcgccaagttaaaagttgcaataaatcgtcgatcggcacattaactttcaacgtctcccagtaaatgcgagtgctttatggcgatccaacaaactggtatggccatgccttaattggtttagtttttatttttgaatcttgattggtctaatttaattgtgaaataaatagctcggctcctattacggtgaaataaatgccgtccgattgttaaatttaaatcatatattcacatgtatactatatactccctccgtactcgtaaaagtaaatcgtttaagaaaatgtttaagttaaactttgagaatataaatcataaataattctcaagttgttgagtttgaaaatgtaaaaattatatgaatagatttgtcttggaaaatactttcataaaagtatacatatatcactttttaataaatattttttatagaaataagaagtcaaagttgtgttttggagaccgtgtcgctgtacaaaacgacttcctctacgagtacggagggagtacatgagattttctggcatttctcataagtaaatcatacatggtatatactccctccatttaaaaacagagagattttagttttatcgtaaatcaaacttatctaacttcaaatataaaagcacaccaatacattaaacaccaaattagtttcattaaaataaatattgaaatatgtgccttgatagcttatttattggtatcacaattgttaatatatttttctataacctagttaaaattagagaaatttcacttacacaaaactaaaacctcctatagtttagaacgagtgaatactctttaactttgaggctgcattaatttgtaattatgcatttttgttcttagttttgacaatatttgtaattagaatccatgcattctaaaaaaactatttaattaagcgaattggtgtacttcaccttcacctagttaggtttcttgcggtggaatctatccatcctggctcatgtcctaaacttgagatggatacttatatgtacggttaattattctatagtagaagccaacaacaagatactcatcatgacttcatcggtcagaagatatagacgtgggtagggctgaaaaaactcgattagctacctcggtggctcggttcaaaattgctcgccatgatttgatctttttcttttaaaaaaatattcaattgtaaacgaaagttatttgcgctttggcttggctccttacttcattaacaagaataggcacaattgatagataaaaatataataaactagaaaaaaatgcccgtgtgttgcaatgggtgaagtctattttaatcttgttatatggtttagttaagatgaaattcactgtgggagtttgcttggatatatatatttttagaaaatcatgagctgtagttaggagtccgatcgtctcaagttagcatacgagtttttttaaaacatatttcttgtatgattccttctgtattaccaaaagtgaacgatcttaaaaaccgactcaaacacaaatgactaaccgcgaaaacatcttcaatttttataatcgactcaaacacggatgacggaccgcggatagaaacatctttaattattataatagtaatagatatatagatatagatatagatatagatatagatattgattataggaaaataactttgaagaatgctagataaaaagttgaccaaaagcttcttttgcaccggaagtgcgggtgtatgctttcatacaagtgagtgtatatcagtcggtactatgtttcgaaaaaaaaaaacaaagacacgagggtagcatgcatgcatccacggtgtgtactatattaagatgaattgtgcgcataattaagcacgtacgcgtacgtccacacataataagcattggtgcgaaatttcaaatttatgcttgcttcgaaaattaagattgattgaaatttggaagtttcgcaccaatgcttgctttcatttggaagtttcgcaccaatgcttgctttcatagttcacgctaaaattggaagtttgattgaaattggaacgatgcgatgaaaaagttagaagtttatgtatgtaggaaagttttgatgtgatagaaaagttggaagtttgaagaaaaaattgagaactaaactcggcctcattaaactataggatgtgtcacatccaactaaaatctcttattatgggacggagggtataaggttgtactatgttatttttcaaaagttaagggttaggtgagatgattttcttcactactaaattacaaatcgttaggcgctctaaataagttttcacaggcagatagattatcgttcggaactaaaggccactgagaatcgacaatgtttgtaggtttttccacacccacccatcaggctgacctatgaaagcctttttttttatgcaaaaaataaaataaaaatctaaaaaatctagtagtcgttgctccccgtatccatcatgagctccttgccagatccgtcgtcatcacctgagctcctagaattggagctgcatactagcccccatcccccctccccaatcgcaatcgccagatctggcaacctgttatacccaccaccacagtatgtggatgacccctcgcggtcatcgttgtacgtggttggggtcaccatcattctcgtagccttgcgatcaccgccgctggtaattattatggtcgaagtcatggatctagagcagctcatgagtcgccgccccgtaggatcggccaatggtggtcgatccggtgctcccaagcaccgccgttgcaagatctgcttcctctaaccgcatctgccttttgcctttttcccgttcgctttgagtgcagtcatatttcacccagagcgtcaggaccagatctaatacgttgaggaagactgaagcaacggcgataccactggtaggaaaggatgaaaggccgaggagggggtgttgggagagagagaagacgggagtggaggtgaggagaggccgaggagagggcagagatatcaaggaaatgagcgagagtggagacagaggaggtcacttgtatggtggaaatgagcgagagtggagacagaggaggtcacttgtatggtggtgttgtagatttttaatagggtatctatttattacgtggaaggtgccaaagttttgtagcggtgcttttcagtcatcttattggttaagttcaaatttgaactaattagtttattagaatattagatttccgtatattgaaactggttcgtagaaatgtttactccctcataaaaaaaacccaacctaggatatgatgtgacctaatccaagactatgaatctggactgattcatataatagatcacatcctatatatctaggttgatttttttaaggactgagggaatatattattatatatagattttaattagaaaaaattatagtattttaaacagagaaagtactgtgcaaagcaatagccgccgacgacgacggacggcatgcagcaacaaccgcagcaaatgcagcgggagtgtacaggtgcgaagctggctggagtcgcaaacaaaggcctctcatctcactggccgcccgtacgtgcttcattcagtaataatggcggctaagcttgcttgccaggacgagatcgagcagccagcctgcagggcgccattgccatcgccaaaatggagaaaatatagttagctgctggcgaggcaggcaacccgtgttgggaggaggccattgataagccgaaaaccttggtgcatgtatgcgtgtgtgttctcgcataattaatcagtaatgctcatcatattattaatgctgtacatgtactccctagctagagctagtacctagtagtatgcatattggatcatcagtatttgcgcgtggtcattaaatccttaaacctaacacttcaattgtcatccacgatctgggtccgttaatcacttgttattacgcacactacggagtggcttgaatcgtactagctagtacaggcttgttttttttttcttttgttttgttttcctttcgatcatcttcatgcagggaccttattgactactgtacttggatagttcgatccgactgctagccaatcgctctattcaatcgactagttcggtcgatcgccggtcggcactgccagccttgataaccaatagttaagggggctgtttggttcactccctcactttatcaaactttgctatactttttaagatatatgtttgtttcactttcaaactcgtggcatgccacagttttttaattcaaaggcccacatgtcatacaactattttttagccaaaccatgtctaaggcgtggccatcaatttataagtcacatatttggctagattacatatttggctaagtttggcaagaaggtttggtaatgtttgggagggaaccaaacaactccttaacctttactatagttctgttgttgggggacgacatcaggaggggatgaaatcaggcgctgacgtcagcgcccaatttacgtgcaaaattaatttaaattgatttttctcttaaattacttatccaaatcatgatccgattgcaccattaaattcgttgcaattaaatcttcaaaacaagaccacacatggatatattccgacgaaaattttttttagcttattattgaattatttttaaatgttgcacgatgttccaccaggtatatcggaattgtttcactaagtagatcaaaaatgtcactcgtttaaatcgggtgttgttttaccttatataaaaacaatgtttcagcaaatagcgaaagaatgtttcagttcactgcaatatttgatccatacatagtgaaacattacaagtacactaagtgaaacatttttcggtggaacaaaaaataaaatgaattcccttaataggaggtttccaaaatatgtggttttttttgttgcaatggaatatttcagttcactgcaatattagatctatatatagtgaaacattgtgagtacactaggtgaaacattttttatggaaaaaaaaataaaccgaatttccttaatagaggggttccaaaatatgtgggtttttttgttgcaatagagttgtttgtgtgtggacacgtggtgggccaggggagtgcagacatgcacgcgcacgcggggggcggggggagcgcctgatttttcctccccccgcccggtcgcccggtgcacagcattatccctattgttggtttggtttcacttactcactgctgaaaaagcgattttcacggatgaggtgcttatgttttttcaagcgaagatattttcttttagcagaaatccgcctgcaaaatgtgtgggtggggggtggtggggggggggggggttgatgatggcggtccacatgtgaagatcaaggaacatgactagtcatggccaaattttaaatttgtttttttctccaaaaaaatggtgatattattaattaaataaagtgattacaattccggaggcacaagattgatcataaatataaactaagaaggtagcccgtatattcacgcgtgcatatatcataggctgcatttgagatacttgtaagtaatagaccgattgtattagaatgtcgtatttgttatatagcaaactataggcatgtggatctaggcctgccactcggtattcattacccatccgatatccatacccacattatttatgtagggtataggtaaacaaatttacccatttaaaatttggatttgtggagtgtattacctattttacccactttgtacatacccattttctatgcgtaaaacttgcacctaaaatttttaaactctcattcacattacaaaatcttatcaaatttgactttaatttggagggatgatttctgaaagagcaattttgtacaaattttggtcaatttctacattaagacccacatatgtctcttctcttatccattggtgtacccatacccattgggtaatacccacttaatttaggtatgagtaattgctagtgttatagataaggcatactcaatagtcttggtttaggctcgatggagcccaccatataccaagtcttatacaaaatcatgctttattacagaaggtatttcgaataaggaaggagaaacagagttttacttctccctaattctattttccatagttctatttgaagaaggggatattcgagggcataaatacaagatccctagaaggaaggagaacatgcaacacgtctagatagatctagacatgccaaaacaaaagacatgcccaatccggaaaaaaaaaacaagagggatataacgctacctccaaggctatctcactgaatttatattcaaagacgaagacaacattagccgtcgactatgattagatgaggatgagtaaaattagatatggatattggtttccaaataccctccatgctcccattaaattaatttcagttatttgtgtccattatctattaaagaaactagtttactggtgaatcggctactgtatcacacatccttccgaccatgcatgtagcgatgtgatgtacgtaagccatcaattttcataagttttcctaattaacacgcaacaataaacaaggctgatcatgccggtcactgaatgaattatgattattagcactccactagctagctaattaacgagacctaattaacgtacgacgtacgtggatattaaggtagccaaacctggagaactatatagtacgtatatagtatatactactagctagcgcagcatacttcttcagatgttttgactgatcaaggaaaaagatcgacgtaggaccgactaattaatttgcatgtattaatttatactccctccccatcttagacaaaacatcatttttctcatataaaattatttttttgacgaaggaattaaccacgtatatgcaaactatatatactgtgtggttactggccttatcgcggggtacggtaatagaaaaaccacggtaacctcctcaaattcaaataaatttaaaaataatttaaatttttgataaattttgcacagtttcgtacggtttttcacgggttaccgcgcggtaaccgtgcttaccgtcggggcgcggtaaccctggccccggcggtttggaaaaccctggatctgacacatgcaatcaatagatgcatatgactagctagcttgctgcggattcatcagttcttcatgcttaattacgtgtaagtgagatcatgcacacgtttggacgtgccgtacacgacctggtagtagcattggttgacctggagtgaacacgaacacaacgatatactatatatacatacatatcaacccatgcatatatgtggtatttttttttgtttgaacattcatatatgtggttagacgaccaaatattcgagtcatgctttgtatctaagctatatagatagaccaaatatactacggcgcatgtgttaggagagatcgagggtagtctttacgcatgtagtgtgaatgtgtgatccgtacgtggccgagcgcaacaaaagcacgtcaatgcggcgtgcttacagtttttctttttctattttctcttctttccttccaactgatggtagggaataaaaatgcagggatcctaattagggcacacgtaccagggagagaattaagttgcgcgcagttttcgactgcatggcgacaaactaaggttaaggttagggtttcgggctgggggaagggagggtggtgctgggaggaggaagtgtggggaggatttagagggatggcctaggaggaaacagaccaacagtgagtagcggacaaggccagaaggcaaggtggcgatggcactgctggaggcgccgggtttgcagtggacaatgggctggtgatggtagcagggataaagtgaggcgaaggggaaggggagggtgaggaggccggccgggcagggcggcacgttccgccctttcggtgccagcaaggctggggcggcggcacggtgggggtggcggtggagctaacctgttaccagaggaaggaatatggagctatcattgtcgccccttcgctcgcatcattgtcgctcaactgcaacccctcttctccgtcatagcaaatcactagagtgaggaggaagaagctcaccgtgaggctgtcgcccgctccgctcacgtgcgttgagtggagaggggaagtgaggggaggggagtgcatgagaggggggaaatggggtgagatagggggcgtgcactcatgcagagggagaggaagtgtgcacgacttcccctcctagctcacgtgcacttgataggaggccccttaaacgtgcttacaaattttccttttctttttctttttggtattgctctatggcatgtgatatttttttaatcaatagtaattcattaaccgaaaagtaatgcaaatttaggaacagttgtatatcggtattcagaaagacttttacatattcagaatagttgtataccggtataaccgaaagatttttgcaatgtcataaaactatttaaaattccattaattttgcaatggaactttgttaatattttttatctattgtatgagatatgcatattgtcatttttagttatctttattcttttccagaattttactagatcattgatatgttgatacaatcaatttgaagaattttatataattccgttaggaattttctcaaattattgatgttatgagctaaaatttgagaaaatatgattaagtttcctacatggtatttttctatattagttcctatatttgacaaaagtatgattaagtttcctacatttgactacttataatttcaaaaatttgagaaaatattatttctttgttcctatggtattgtcaaatttgagaaaatatggtattgtcaaattctaacatggtatttctttgttgctggtttcacttcctttaatattatttttctatattagttcctatatttgacaaaaatatgattaagtttcctacatttgactacttataatttcaaaaattttagatataataacgaacgttatcccatcatgctgatgaaatgattcataattctgtacctctatcctttgaattgtttccttcaacttaaactttattagcttatatgttgcctaattgtactttataagcaattaattatgccttattcaatgctcttgcatggtgtttaattgtacttttctgagcatcaaattcatttaaatttctcatttgtctacttataatttcaaaattttcaacaacgaacattatctgatgaaatgaaatgaaaatgctgatgttgatgaaatgatttataattatgtataaatcattttattagtcaaatgagaaattttacaattatgtataaaattgtccgtaactacattaaaacgtactgctaccatattctccccttctttttaatgtataacgtcgttaactttttatcaacatttgaccatttatcttatttattttttatgtagatataaaaatatttaattcatgtttaaagataaaaatatttgttttacataaaaatattgtttatgtataaatcaaggtcgccatgagccaagggaaaaagcttccgatgaattttccatggtgatttccactttccaccctgcattatattaggtactggcgtgtgtatattctaattctcccccgtgtgagcgtcgtcgtcgttcggttttgttttctaaagtcatttagcatttttttttttgaaaaatagatgcaatagcttttgggatgtctattacaattttgatagaaaaacaccactaaaaataatggatattcttgatgttggatcgctttattaagatatgtgcgtctggtttgaggttcatactccaccttatttcttcctttccagctcgtggctgccgataaatgctgatgaaatgatttataattatgtacctctatcctttgaattgtttccttcgacttcaactttattagcttacatgttgcctaattgtactcttctaagctattaatcatgacttattcaatgctcttacatgttatctaattgtacttttctaagcatcaaattcatttgaatatctcatctcatttcttaacgaaacatgcaattgatcatgtaatgaatgtcaaccagtttggattattttttggtaactttttcaacgaataagtacaatttatctatattatttataattcataacctcaaaagtaatgcaaaattcagaaatatttgtatatatgcattctttgaactatttcatttcacttcagccatgttctagtctttgaatagttcatttcctacaattgccctgtatattcaaaatttgttgtatatttaatgaacatctaaaattataactataactatggagacactgggaattataaaatctaatgtctaacgcgagcatcacaaatatttggatgggtattatactatccaatgcccaacgcgagcatcacacatatttggatgagtgggatccaaaacatgtgcgatgctcgtgttggatattggaaaatataattaccggggtgcccacactaatatgaatggtttttagatactatttactaactagcatgcttattttttttattcgcattatcttatattaaaatcacagtgttttaattgtgcaattttatcacatatgcactgtaaattgttgaataatgatattatagttgtattatattcaagaaaaaaaattatgtagtattacctgtatttatagttacaatttatgttgtctagtagacatgaataaatcaaatgagttaatatgatcttgtaggagttgaaaaattgttccgttctattacccagttttatgagctaagcagaatgaaagtttgattgtgttctctttgcatctgaacttcccatgatgtagatttgatctcgtttcctagtagatccaccccatgctgtttacatacttgtcagctcaatttgagtgaggagatggagtacatgtcaaatcaagaaccaaaggatagagaaaactttccttttgatttcattagattgatgtgttcttccatatgtttttgttttcatcaacttagttaacttatatgttgcttaattgtactttcctgatcaattcatcatgacttcaatgctcttacatgttgcctaattgtacatttcttagcatcaaatttatttgaatttctcgtctcatttcttaacagatcatgcaatcgatcatataatgtatgccaaccaattcagatctttttataagtttctcaactaatcagtatatatattttctcataatcatttatgattcataaactaaaagtaatgccaaatttagaaatagatgtatacgtatatcctttgaactatttcattccacttcaagacactctctattatttgaatagttcatttcctgtagttcccgtttattttcaaaaaaaaaattataggactaaccaacaaaaacttttcataatgaaaataattgaacaagcatcttaaattataactataacatgaatgatgttcagatgctagcatgcttctttttcatttacattgtctttatattaaaaatacaatgttttcattatgtaattttataacatatgtgatgcatattgtttctactgctattataaagagaaaattccttctatacccctaaaagtttagcaaatcccttctacgccctgagttttgtccactcccttgtatgcccctgaattttggttttgatccctttcatacccattccgttagttgaccgttagttgaatgtttaattcctatgaaaatgaccattttgcccttacacatgaaggaaatctgaaaattgtagactagctatattgttggaagtgtataattttgttatataagactattatattcatgattttattgtacaaggtattattcatttcaaagtttatttttacataatgacataaaaaactaatatttatttacttattaaaagagtatatgtagcattttttatggtacttagatcaacattttttttcctgtcctatatattaggaatgttttccaaaactatgcttatcatttaaagaaaattctatacatactttttaatatttattaaaatgtctatgtacaacaaacttacgaatgttataatcacacaacaaatttctatactttcaacaatatagtctacaaatttctacatattcctcatgtattgaagggcaaaactgacttttctatacctattaaacggtcaattgacggcaagggtatgaaagggatccaaatcaaaattcagaggtataaagggagtgaagagaattcaggggcatagaagggatcggctaaaatttcaggggtatggaaggaattttctctattataaaaggtattacaaatatagtaattgcaatgaaaaattttgaatcaggtaactgtggagcaaagtagtttacttgttagtttttaatgatgtgattttgtagaaaaaaatattgatgatatctttctgttgtcctaaaaattgtcagcataaatatttaaaaagaaaatatagtcaattacataaaatttgcatatgaatctggtttaagaagattgttgaagtttttgatatgttatatgaatagtacatgtttttcttttaacagaatgcaatttacttgaatcaatggtagctatgaataaaactggtttaggaggatcgtagacctatgaaaaacatgtttgtgtttggttggctggtatcaacaaccatgtacttcgatattaggagttcgaccttcctcccccatccctcaactagcgcatgggtatacaatttgtttcccttctcacatgaatcttggggcaatccaatattattatcacaaatctaaaagttttaactactaaaaaacgatttttttatacgagagcccctataggttgcgcgcggaccataacagatcgtgtctacaaaaatcgaaccccccatcttcgcatatggctccttaagaggcacgtgtgcaaaaatctattttcgccggtgggtcacttaaggagccacatgcaaaaataagtctattttctcatgtagtcctcttaagggaccatatgaaaaaaaaatagattttcacatgtggacctcttaaatggaccacatgaaaaaaatacctccatcttctccggatatattctctcctcctctttcttttttctctcatcactaaaaaaaacttttgcctcctctcctatcctctcctctcctctgctctctctccttttctcctctcgccccctaaccgagtggcgagcaggagcaacgcgtgcatgacgagggccggtggtgacggctggcggtggacccggcgatgccgcccttggcagtggctccggcaacgatgacggcggggtttttcgaattttttttcaccgaatttatttttgcatgcggttggtatagttgaccgtatcagaaatctcattttcgtgtgcggttgcgttggccgtatgggataatccgatttttgtggaccttttggtgtaagtgggctactcatctgtacgtaaaaatcactttagcctcgcggaaaaaactactttttagtagtgtttgaggagaaaaacactggtggaagttttttagcaattaaataaattaacagagtataacactatgaaagtactactatatccttaacactacgataagataatcgaccatatacacgtcctagaccaaattaatctctctcacaggcctactacgacagaccatatacacttaatccattataaaccacagttgacgattagtagcaagttaacagaggactaaacgctactacgactacgacgtatactactgccagtagtgtactagttagtacacccggtcactggtcatcagttggctggtcgatcgacctctcttccgggaggaaaatgtgccgcacattacgctctaatcaaccaccacggtcttactgactgattcatccatcagtcttctctttgaattttccacttacatctgatcttcgtctggacacagccagggttgactccatccgtcattgctccaacaaacttcatgtcactctacgagctagagctagctagctaccggtaatttcgttatatgtaaccgttggatagtactccctccgttcctaaatatttgacgccgttgatttttttaaacatatttaatcgttcgtcttattaaaaatttaagcaattattaattctttttctatcatttgattcattgttaaatatactactaccactcaagtttttgaataatattcacaaaagtttttgaataagacgaacggtcaaacatgtttaaaaaagtcaacggcgtgggaatgagggagtacaagtgtagtactactagtgttcacacatcatccaagcttactgctcctgcagagtcgtgggcagatctacagtgttagcttagatgcaagacaacgtcaataatttttaattgaatttatggttaaactgtttattcataatactacgatttatatatatactaattaacatactatgacactacactagtacgtatgttattatgatacaggaggaccaaattgtatcagcctctgtgttcttttttggagggtctgaacctgatatttttttcgagcgattcttctatctgttttgttttgtaaccagtgtcgcaatcaactctttaattaatcggtgccatgataatcatagttaacaattaataatatcaaagtccctacatattaaattctccaggacaaaggaaaaataagcacactgatgagctagccccagcgtctagattgtatagcaagatatctgccatttggtccttccctaccgatgcaaaagacgattaaattcagacatgacgtgttgccgacatctctcagcactagcaaagatcgtctgcatggcttttcaccacaaccaaaaacttccagataaaatggagatgaacacagcacaggtcacacacatgcatcacaatgcacgtttcatatggtaaatttgtgttcttcctcctaacacacacacacacacaaaggcttataatatgcagggatatattcagctaatccttttttgacttgttctttctttgttccctgatggaatgttcaccatttggcagggaatttcttgtgtttacatgggctttttcaccccctactaattagggctaagcttctgggtgccggtgccaccagtttctagtcatgttgttgtcagtattagtgtgattgtgacattgcttaacctgccttttaccatctgaatgtgatcaaagttaaagtactccacacatttagttggagcatctgcaactgagatcaaattaacgacagccgttgccttttttttttctctcactggaatatagtagtatatatagtggagatgataattaaccgtgcagcttatgttgatcgatcgatcgatcttgactgctgcatgctcgtagactttaatttgttgtgcagatggttcttcacgcgtgctacgtaaaaagcaaagctaacgaaagcaattcaattcaagcactgcatgtgtagtttgttcaacacttagcaaagcagctttaatatttcatgtgctttttgtgacagttttatctgagctttaacacttgcctttcgtatgcacaggagaaagtgagaaacagagtagcagtacgtagttttcaacgagagacaaaactgcttaacagtatctgcttgtttatactgatcaaagtctcaagctagcaaaaaaagattaaaactgtctccctggaagacattaatctttcagtataaacaaagcactgcagttttaatctttcagtataaaaagattaaaactgtctccatgggcctccagggagacattacgtgtgtcaggtacagaaagcgtatccagatctgaaaaaatgctggtccattttgatgtagttccatcatgatgatttatgtactggatctcaactgccatctgattattgatacattgatgaagagcgatgaagcccctgactttactgatacacagcttcctatcaccaaccgtaaaacatgtgatcgcattgtcattggagatcaaattaaagcgacacagatagtattaatattcagtattcccttcgattataattattcgacacaattaagtatttgtattaatatttaaaaagtttgtataaatatatgagaatatacatacttaaaacatctttaaattaaaataaaataagtcacaataaaatattttatattttttaataagacgaatggtacttaattagccgagcaattttaccgtccttgaggaggtaagtggtacctcgtagtacctccttaaggacaataaaattactctaattagaccgttgtaattcatggatacgttactagctagtataaaaagggctacaaattaaattggcttctgttcatcgtccacactggcacgtgcgtatgcttcgagtctatcagcatcgcgtgggatcgatccgcttacatcgtcgcactcgcacgcgcgcaaccgatcgatcgagaggcccccaaccccaagtcgcagccgttactggctactgcgctgccatgcccgtgtccaactgatctagtagctagtgcgtgtgctcgatcgatcactcgatcagtagcacaaattaaccagcaaaactatcggttacacattgacacttatagtgtacattatatctattcacctatatatctgcaattctaaattatctggctgtgtacataaaaagacgtgaatatgagggaaggacataatatcaaataattagaaagagtaaggcttcaaactcagatcgtctagcccaccaccttgtgaagctagccggaagaccccaggtcgtctggctgtgtacatggccagacattgaccgtgtacacgacccgatattttggaattatatatataggcgaatagatatactatacgtatctatgtgtacatgattttgtcgattagtttgatcataaatatttaaacgattgattttggcgatgaagtttaaccattcgtcttattaaaaaaactataaaatattttagtgtgatttattttatttttaaagatgttttaagtatgtatattcttgtatatttatactttttttaaataatacaaataatcaaacttaattgtgtcaaatatttataataggaaggaatacaaagtagtatttctacgtacggtaccgtttgggaatattggcaaacagtaaaattcccaacttcgtgtatataggataagctggctaattaggtccctttgaatcaaaggaattatgaatgaattttataggattgaaattctataggaaattttcctatgtagccctttgattcaaaggattgaagttttccaaatcctacaaaattcctatggaatggcttattgcatatagattttggagaaaacttagcaagaggtctaacctcttgggaaaaatcctttgagtctatctctctcatccgatttctgtgtttttcctgtggtccaatcaaacaatcattcatgtgttttgcaatcatctgttttacacttgcatttctgtcagaatcctatgttttttctattcctctgtttttccattcctacgattcaaaggggttaagcattttagtcgcataaaggtggataaaatgtcaacttaaatttggtcatttttgttcacttatataccaagatttgacatgcatcgtgtgtgcatgcacactatcaagtcaagacgttctggaatttgacctaatcagtcacaattgaaaccaaccgaagctacaactatggtacacgtatctgtctgaccggtgcgaaactttgcgcgtactgaactttcttctataagatttaagtgagttatgtagctttgacaaaatttgttcatcttttcaacccctaattaacatgcatgttttcatggttatttttttttcacataatgaaaaactaaaattatctagaaatgggggcaaacgtgttgcctggagttgaataatcttagcactttggccggtacagttggacttgaataaaattgtcttgccccaagtgaaatcagggagttgaccgatcgaatgatcgatgcaaatgcaaaaatgcttaaggaaaatacatctttgtagcacaggggattttgccatgcaaaatttgaatcttagatttttctttcatgcaaaagttttatgaataataatagaaagagctcctattttatgccattcaatgttatctttgactagcgaaagggcctgtaacctatagtggttacaagagtctcagtagcatctgaggtcctgagttcgactccccatgagagcgaattttccaggatttaacggcgttgtgctttcagtggtagacgacgtacccatcgacagcgatgcgcctgtggtgactttgtcaatctccaggattggggtaggatagcatcataggggtaggatttgcgtgtgtgcgttcatagaggtgagtgcacgtacgttgtaagtgtctgcgttttactgtgtaattaaaaaaaagttatctttgactagttggaacagaagtagatcgaagaaaacattactaggtttcaacaacaaaaaaaagaaaaaaaaatactaccaagaaatcagcatttcggcccatgcccgtagcctgatttgtccttgtttgatgggcctccattctggccagccacgtaatcaggccaagatattaacgtaccgcattaggcctagaatttggacggaataagttcatctgagttcccttaacttcaacatgggcctccattctggccagccacgtaatcaggccaagatattaacgtaccgcattaggcctagaatttggacggaataagttcatctgagttcccttaacttcaaccgaaaaaccagatacaacgggtccctcaactgaaaaaaccagtgtagatgaggcccctctgcggttttgacggcagttttggctgacgtggtgcctacgtggcaaatttgacttggtctttatctgatgtggcatcgacgtggtgctaacgtggcaattcgatccagaaaataataaactttgtgggacccacatgccagcctcacacataaattaatataaaaatggtggggcccacatgtcagctacaaataaaataaagatggcggggcccatgtgggccccacaagtccctcttggctctccatcatcctcgcggcggagcgacggtgaggaagaggagcgggcgccggcaacagcaagccgcgggcggaacggaggggcgggtggagcaacagcagatgcatcctggcagcagacgccaggcggaggtggtcagaggaggaggttgctaacagagcggtggcaagccgcggacgcgcggaggtgaccagaggaggaagaggcagaggaggagatcgccgatgagcgcagtagctccactccgtcggccgctatgcccgcgatgcccagcagaacaacgctgccccttcttgctcggccgcgccgcgccacctccttccttgcccggccaccgcacaccgcctccctcctcgtccggttgctatcgctgacgtccttgatggtcacatccgggtcggagccctccctcctcacctggtcgccgtgcgccgcctccctccttgcccagccgccgcgcgccgccttcctcctagcccagctgtcgcgcgccgcctccctcctcgcccggccgccgtgagctacccctcctcgcccgggcgccgcgtgccgcctcggggacaggagagggaagagaggaggaagaagaggggaagagagttgaagaaagcgagatgatgagaatgacatgtggggcccacgtgggccccacaattttttattaatttatgtgtgaaactgacatgtgggtcctacggagtttattgcttttccagatcaaattgccatgtaagcaccacgttaatgccacatcagataaagaccaagtcaaatttaccacatagacgccacgtcaggtaaaaccgtcgttaaaactgccgagggacctcatctacactggttttgacagttgagtgacccgttgtatctgttgaacgaagaaaatcggattcattgacaagttaagggacctcatatgaacttattccaatttggactaatattttggcccacacacacgaatgggccacgattcacgcccacataaatgaggcccatatataataatgggccggaatttggaaccatgcagacgagttcttacagggccaacgtctcatcaacgccaagaaaccaaatcatcattactctaattaacatactcctaattatctttctaatcaattaattaaacgcaaaatcagtagttttctaataattttattattaaaactgtacttttagaatatttcaccttataattcgatagttttacaataaatttactgttataaatatacatttaacagttgagtgataatttaaccaaataattaacatattatttttaaataataaaaataggttatatcttccgactttgtccatggtcacacaaccaacaaatttcacaagaatttaaaatggatgcgatgggtcaaaccctcaactctcaccaataaaatgataaagtgaaataacgttttcaaaatcagagagattctggcacgaaataattatctttctaatcaactattagttaattaattacggagtagtgataatccccggagctcatctccatctcctcttccgcttcctactcctactccgtcgcaatccgccgcctccaaaaagcatccacctgtacccacaaacggaagcaaagattccaactttcgatcgagagcctcgccgtcgattcccccacctcggctgagcccggattccgaggcagcccccccatggcgggagccgagcgaccctactacccgccgcggcccacggacggcggctccggccagcccgccggctgcgactcgccgatgaggtgggacgacgacgacgaagaccacggtggcggcggcggcgatggcatgaccgccgttgcggtgagcaatcccccctctctctctctctctctctctctctctctctctctctctctctctctctccccttacgcggtttcgtcactgtgaagattggttgcgtgtacgcttagttcgtttggttgagttcgttgtgattttaaagcttgtggtttgggcgattggttgggtgattagggcttgctgtgtgattgtgagaatcatggaggaatatggaaaatagaatgctttaatgggtgattgggttaagcgcttaagcgagaagcaagaaaaagaaggtttgggtttttaggattgtatggctgctgctgctcatcgccgtcgccgctttggctgctgggaattatggggcttttctacgattatttcttttaaacatgaacgaatttccatattggtttctgttgtaattttattttccaaatttagggattcaacctgttcgaggaagaatcagatgaccctcctgccaaaaatggcgtggtcgacgatcctgatactaccactacaagtgattgcaacactgatatgagtgaggatcttgtaaagagggaagaagggatgaacttccattgtgatcccccgcttcacgaacatactggcatctgggtgcctgtttctgtcccgccaatgaccaaacgcgatcacgaggagtggcataagggctttggtcataatggtgactactttccagaagacgaatttaactgggagatagatgaagagaacaaggagatgacgatgtgggatgtattttctgagatggttgttgcggcaaaggataaggtaatatcagttgcatcgtatgatcttgggagacgtggtatgtctatgttgtccaagtttttcttccaagaagcttggaaggatatggcccaaacacttgcagatgccaatgctggcattgcgaatgagctcctagagactgaacgaacaatatggttacctgacagcgctgccagcgcctgcatgctctgtaacgtgcgttttcatccgataatgtgctctcgacatcattgtcgtttctgtggtggtgtgttttgtggtggttgttcaaagggtagaagcttgatgccaccgaaatttaatacttcagaacctcaaagggtttgtgatgtttgcggggtacgtctagagagtattcaaccttacttgataaatcggatcagtcgtgcttcacaacctccaactcatgatgtcactgatctgagtacattgaggtcgtggctgaacttcccttacgcacacacaatggaatatgagatctacaaggctgcaaattctttgaatagttactgtaaggtatgcctttttaccctaaattgtttactgttgaatttgtttatcagtgctgttgtaatttttttagacattttcttttgttcttctcttttactgtttgagaaatcatgtgcttatgctttagtcatagcctatcaagacttgtcacctaattctaaggtgctttatcatgtcttaattctcaacagtttatatatgatttactatggacatcactcattaagtaattgatatgttcctttcttgctaatacaataataatatctataagacttgtaacagagtatggtcttccatatttcttgcaaagtaattttcagtttccttaagtatgagttgaatagatgaaaaacctaacccggtgattggataagaattgcatagatatttgctctcagcttttgcacaattacacctgtgtaatctatagtggcatcatatggttgtccacaacatttcagtacgtttatggtcttccctctgttgtataatttgttaatgatatctattattttttaaagacatacctgtgttacattcatccattccccaatctttattataataactctagaccattcaagttacagtaaatgctgccaactaattaaaatgatatctacattagttgttttagtgatatattcaaattagagaatcattttgtctgtcgaatgctggttcgaagtattatacaaactaaaattgggtttccacatcattctagcttctgaaagtgctgattgttcagttagttcagttgttaggagaccaaccagtagcagtgcaatcattttttttttcttccatgtgccattcaggtgggaagactgaaaccagaaaaggctatcccctatactatccttaaacaagcaaaaggccttgctataattactgtagcaaaagtcggtatgatggttgcatataaagttggtactgggctggttattgctcgaagagccgatggttcatggtcacccccttcagcaatcgccacttgtggtattggatatggagctcaggtgacatcttcttttctagtgtcctttatgtgcaaattcttttatcatcacactagcacatcataacaaaatcagataatttccgacttacccatcaggctggaggtgagctagctgatttcattattgtgctgaggaacacagaagctgttaaaactttcagtggaaaggcacatttgtcagtcggtgctggtgtaagtgcttctgttggccatgttggacgagtagctgaggctgattttcgtgccggtgatggtggttatgctgcatgttacacatacagttgtagcaaaggtttgtttcaaatttactccatggcatgcgtcactttggcgtcttctttcatatgttcattttcacctcgctcaacatggaacacatgctttattatatgatacgactgtatattcgtgaataacttcttttggtggtgatggtgatggttgggagaatatgtgtaacaggacagttcatggttacacaaagagtcaaataaacatgtaattctgtcttagaatctcttaaaacaaaacaacagaattggattggggtccttgacccatagtttctcaatatattaaggtaatttaaagggttttgtttgtatccattgcaagttgattatttctcttggatttcaaatggcagacgagtaattctacaaagtttgggaatgtcctcttaaacccaattttagttctgcatactttttataccaacacaccaggacctgttttaaaaggcccatagcttagtaatttgacccttctattattagctttatctttgaatgactaaaatatgtcctagtatatcttatcactggataagtgcacaaattctcggccttcattggcttacatcacgaacttattttgttactgatgagtaggcattatagtaagcttagccattcctactgttttttctcacaaagaaataatgtttaccttgttttttctcacaaggtaaacatttatacgttgaggcaccctgagaacacttgggactctagtctgaacaattaacttgttgacagtcttttaatgtaatattaatatatatatgcacttgtggaattcatattcataggagtgcaaaccatgtcatatgcatattaatttattttcgaggaattgctttttgaatttgaactttttgactaaaataataatgccaactgtgaaccactctagactgctggatgcagttatagtgacaaacctaagtagtattacagtgacactttagttcattcgtgcaatatctgatgtcgaatttttcaattaagtgtagcaggatagtaccatttttcaagaaataaatgttcattgctaactgttaagtacttgtggctagatctggtcattcagaccattcagggttgtcttatgtaacaactgagtctgtatatctgtcttatgttgcaggtgcttttgtgggctgtgctctcaatggtagcttagtatcaacccgagacacagaaaatgcccgattttatggtggtccaataaaggcacccgatatccttatgggatccatggctagaccacccgcagccgctgcgctctacaaggttctgtcagaattgtttgacaatcctgagaagcaatcgctttaggtctctagtatgcgttgcgtcttctggtaaatacattctggaactctctgtcaagtaattggattgcggttttgcgatcttttcacttattcgttggttgcagtttacgcaattgtacagtctgccattcattgacacgccaaaggtttcacatcatggttaccacaaaaccaaatgtaaatacatgtacattggatcccttcttgcttcatcaagatataaaagaaaaaaaatatatactattttccattccccttgatgatctgcatgcatgttcttcagctgcattgatcagcactcctgctgtgaatgacctaggactgtttttttttttttggttgcatgcaacttttttctcagtgtacatgtgaatgtcctcccatcttttctatgatctttgaatttgtgcacctcctccaggggaaaagaggagggtcccccaacctctcttcttgatagaattcacaggcagtatagtcatttttgatggtcctaaagaggacactgaaaaagctggttgtactggctctgtcatcctgttgtgatgttgtgtgttgttgcattccctgggtaattattttgtcctggcaatgcaatagcaaactaaaatgtactactacttcattacattgtttcagctagcctgtaattctgatgcaagaaattcatgcagaattgcactagacctgagaaacaatacttctctagcaaaagataaaacagaaaatgacttcatcaaggtagtggtggtattttttttttgttcatatgatgccattgcacttgacatgatgagttgtgagaaaatactccctccgtcccaatatattaaaacctaggataggatgggatattttctagtactacgaatctggacagaattttctagtactacgaatctggacagattttaatatattgggacggaggtctgtccagattcgtagtactagaaaatgtctcatcatgtcctaggttttaatatattgggacggagggagtgcatgacactgcagctaatgactatgattactgaagcgtgccgcatgttgagcttgtctggcatgcccagagcacacactgcagatgaatggaatctctgtccctgtcactgcaaaatgtatattcctggtcttaacaaacaccaatgtccatccagccctgaagatacagtaatgcggcagtgtccaatcggtgtctgactgaatgtgccgtcctcgatactagtgcccttgaatcattgagatgcataattcacttcagttccagttcagttctaccatgatggaattaagctgaatatacttactagagatgagatgagcaagagaatgatacagtatcctggaaagtgagtagcaatggataaatggataatcaatcagcaacacacagaatacagagcataaaccagcattgatcatgagcaggaagcaaaatgtataaaattattctctgaattctactcccaactgtctgacaacccattaaccatgaacatcctaattcccttcccttgccatgttttccttttcattgtcttctaacaaccgaaaattataggatataagaaagcaaaaaaaaaaatcaaaaagaagctaaacttaaacgacggcctgcatgaatttaaacccagttcagagactcctcataagatgaacttcttctgaacccctctctgatgatgatttctccaattcttgatttcttcgtcttcttcttcttcttgatgagatgaggaagtaagcttagcgatcgccgcgagtcatggagctcccgagggtgagctcgagatcgtcggagccgcactcctcatggatgcgctccccttcccacgccttcaccagcccggtcatcttgccgccctcgccgccgaacgcgaactcgcggcgcgccgcgtcggccatctggacgtcgccgccggcgaccggcgagcacgctccgctcatcaccctcgaggaggaccccgcggcggcggcggcggcgccgaacgggttgggaggaggagccacgaggctgtacgtcggggacgacggcccggcggaggatatctggaacccggcaagccacgccgccgcgtcgttgccgccgccggcggcggcggcggctgcggcgaccttgcggcgcgggctcggcggggtggagtttggcagggacgacgaggccgcgtaggcgtagctcgcgccgacggtggcccacggcggcagcacgctgccggcgtggtggtggtggtactcctcccaggcggccgtcttgaggcgcggcgtgcgcggcggcgagcccgagggcggcgtcaccggcgcgctgatggagccgccgccgaagtaggagtagtgcgccgggaacttggacgacgagccgccgccgatgccgacgccggcggaggagagggtcttgagccacgggatgaggctgctgccctcgccgccgccgccgccgccgagcgtgatctgggaggaggagccggagctggggaaggaggacgtcccgcgcgggctcggctggtacgacgagcacgggctcgccgacggcgagcggccgagctgatcagcgagctctgacgccggcggcttgcatccctgaaacacacagacgaacggttcgacaaattaaaccaaattttttgaagcgaaaatttaaaccaaattggtgaatttgacaatagcaagttaatgacattttgcatagaagaataacaatcagaaaaatttatcatgtacagtttaacaagaattaaaaaaaaaattgtaacattttgcatagaagaataaaaaaaatcagaagatttgatcatgtacagtaaaatatgaatataaaatctgtgtcgttttttaagtaaaaaaaatgtgacattttgtatagaagaacaaaaatcagatgtacagaacaggaataagaaaatcacctcagaacacaatgtgaaaataaagttacaagaaacgtgaatgcaaattcttactgaaattcgctgcctcagaattaaaacttcacaaattatggccagaaatattaacattgctggcacaggagttttcatcaattcaaactataaccatgataataccaaatagtggcaatgcaaacttaactgaaaggtaattaaaatcctcagtgaaacgcacacaaaaaaaaaaacaactactgctctaaaaagccgattgcaataaaagaaagaagatacttgggtagaatttgtcattttgtaatgcaaagttgattttctgaaatcaaaggcttctgtgacagccttagctttctttgatgtaatattcggtcatgcccatatctatctgcctatgaccatgccactaacttttgtctccataattgcctctttcaccagtccttttttcacatgagcagcttcaattctgtccaggctccagtactacatatagatgcatccatagagataatgctaatcttaaaaagagaatttactcaaggtatctagaggcagagcttgcagccaacttagacttactttgacaaaacagggcagatggattctgtaaaggtactagctttgaccaaaaactaacaatctttgattcttgtattaatctacaccttaattcaaaagcgatttgtttggcagtctaaccatgcagttactaacgcgtgcaagccacatcctattttgcatttcttttcaattgaaaacaagtagcacttcagtttttttcggttttcacttgtcagccaacttgtcatccagaagacttcagaaaagaagagatgatctaatccttaatttttttttaaaagaagagcaggcatctaaaaagcaccatagataacaaaaagaaatgcttgaaaacagatagatttgatacattgtattctgcaaacaagatcctgatagcaatgttcagacttcagagctagtactacaaccaaaaagatgctagtactgctcttctgccaagacaaaaataaaataagaacaaaaaaaagaaagaaaacaaagtgatgagctttaagtacagcaccactactactacgacctcttttccctgcctaaaaagacactaaatcttgctaaaaagacccagcgccacagcatcatctctccaccccacagatgaagaagatgaaatcaacaacaatctaaaaccatttttgttcagataacggaagatctttttaataccaaaaacaacaaagaaacaaaaccaaaaaaaaaaaagagaaagaaaacgaacgctttttatccaggaaacggccacggaatgtcgcggcggcacgcgtaatcctgagctcctagtgcgtggcttgtcccacgcacgcaaagaaaagaggagatgagaggagagaatttcccccgccattatcggagtaaaaggaggaagacgaagcagaggagagaaaggagaggagaggagagagcacgcgcgccgcgttgcaggaacgaggaataaaaaaaaaaagccaaaaaggcaatcatggataacgagaaaaattcggtaccctcctctacagccgacgcaaattaagcaagaaatccattccatataagagcaaaagattaaatgaaattcgacgagaaatcgcttaattaatttgcaagaagaagaagaggaagaggaagagggaccttgcggtaggtggtgccgtcgggctcgacggtccagccggcctcgttgcagagcgccttgagcacctcgttgttgtcgcagtgcttcgggagcgtgtagtttccgtacgcccgcagccccgcgtagatcttcgccgcgatcgcccgccgccgccgctcccgccgccggttgttctcccgctccctccacgtcggcaccctccctccccctcctccgttcatcatccctctcacctcacctcaccgccgcgacctacgaggaagccaacggcggtgcgcgctcgccgtcgccgccgctgcaagctcgccgcgcgctctgcagtgtcagcctcgcaggcgcggcgtataaatacgccggagaagcagtaacggccggaggacgcgcaatgaccattctacccctgggtggtcttgcgcgggggagggtaaatgcggcatttcgcgcgggggtggccggtaatgattccgccgcagttaaggcgggggtggccgagaatggaatgcattcgcagtggcttaactagcctatcgccttagtgaacagtggccatttttagcagcagctagctaagctaagctaatccatgcaaaccaagcgtgagcggcgtgggtggtcaggtgacgcgtggtggggccagggtgtcagtgactgtggggggttggtgtgctactggaccagtggtggtcaaacgaccggccggcttgggttttggatatgttcttgggggtgcccttgatgacttgggttttggtatgatgtgtatgatttggtttgatgaggttgggggagaagatggatatagctagtgtggttgctgtcactgttcaatgtgtcaatgataactctacagtaatgattagttaaaagctagcacgagtctagttatggtttgtaacggttttggttttgtgtagcgcatggttatatagccgttaaattattataaatatgtgtatgtggaagtcaataacgagaattgttgtcattgattaactgcctatcgtagttactgtctgcacgattggatagtttaaacgtatctcgtgatatctcctttgacgatttacacgtgacattgattagacgaaggggacgatattaaatttgccacaataaccaccgtaacggttaatctggttgtgtaacggccatggaatgcaattttatcctcataatgactacatgtagtattggatagtttaaattaaacatgtgattccttctttgtcgatttacgcgtgacattgattagacaattagattatgttaatctttaccgtgacaacagtaatggtttgtctagtaacatagaacgtaaaattggacgtgctacgcattaatagagcattgttatctataataattgatctgcacagtcaaaacaaaagatttcaaacggttcaattgggtctagcacatggttacgtaaccatggaactacaactgtacatgcattcaaggtgtaaataaaacattaatatctctagtaatctatctacaacgtaacgcactagatagagctatggattgtaaagcgtccagttagttccatagcacgattgtataactctaggattaccatttacagtgcatataggagttgataaaaattgctataaaaataatcgttaatcaacataactgcagacacaattatatgtacaggtaacacatattatttgttactaattaatttatgtgtgatattgattagacaaacatggttgtgataagatgtaccgcattaatcaaatcggtttgactcggtcattaactatgaaagtgcaaccgtatgaaatcaatataacactataaatctaataactaccatttcctgagaggaactactgctaggcttacctagcctaaaagggctaggtgcagtcagttattaggggctgtttggttttcagggacttattctaagtccctgtcacatcggatgtttggatattaatttagagtattaaacatacactaattacaaaacccattccataagcttggactaattcgcgagacgaatcttttgagtctaattacgccatgattttgacaatgtgatgctacagtaaacttttgataattatggattaattaggcttaaaaaatccgtctcgcggattagctctcatttatgaaattagtttttttattattccatatttaatactctaaattagcgtccaaacatccgatgtgacatgggctaaaaagttttagccccatctaaacacccccttagtctctctggccatgttaaatttgacagggaatacgtatactaattagagtttaatttattatttttattataacttgtagaaattaaatttgaaattgtattttttttcaatgatataggagtattatatattaatatatcttatcaatatttttgaattttattcataattatttagtaacttggatcatggaagttcaccagagaatacaatccatctctatgcaagcaaggtaccgtaccaacagttgctggcagctggcacgtacgtgaagtggactagagatcagcagcaggagataggccgtgccgtgcagtggctcatgactcatgagatcagcatcatgcatgagctagctagcacacggcgtgagcgcggttaaccgcggttggatgtgtgggtttcagttagtacgaacccgggataccggccaactcatgaaccgctgcttactttgtggagaatttttttttcttagtgaataatttgtgtttgtccactgagatgcatgtctcacacaatcttcctcttgatgcttaatttagatggttaataatatggggctcacacaaattaagcactttttaggttatccatcgataagatcgatgccattttgagtcaagatgataaaagcacagttaatagatacctgcataagtatataggtttatctcatggttaaaagtaaaagatttactactcaatagatctccaaatctcagtcgagtattatcatttatttatatacacagctatattaatagcttaaaaaaatactctcacatttaactacgtcatcaaattgggtcagccattagattgaaatgtctaatacacattgaacattagaccgatcaatgtttcttcctaaaagaattcttatacccacgtatcaacacacgaaatatcaactagttcagtggcggatgcaagatttctaagataaagatacaacatcacttaagcatagttaaatactccaaaaaaaataaaaaaagacttgctataagtgaaagtcaagtgataattttgatcccaatgcaaattaatagagaccaattatacaggaaaatttacaaaacaacgtaactaagctagaaaatacgtttaatacccttagaaagaatgattttgggattaagtgtgcttgttttgacacaagtaatggtatatagacatattatacctataaaatcacttattttttacaaaaatttgggatagaaatgtacccatgtcccatgtcccattgtaggtccgctcgtaactagttgttatgacgtggacaatcacgtgcttgtaatggcctgataattgtctttaactaagctccagctagcacccatcaaacagcgatggataagcgatgaggatggcacaacattaaagtaatccaggccatattcaaaagtaaatgaaatttaaataaaaaagcaagatgatcgataaataatactactacatttgttttttaatatatgacgccgttaactttttacatcatgtttaatcattcgtcttattcaaaaattaaataaatatattttgttttgatgtggcttgatttatcactaataaactttaagcactacttatatttttaagatttgcataaaatttttaataagacaaatggccaaatattataacaaaagccaacaacgtcatatatattgaaaaaaaaatgaatcaatcgatatctcaaatatatcaccccgtctaaacggatatcaactagccgataccttaaaaaagtatcatcctgtccaaaagtataccatgttgtagcattttccttattaatttatccatcaattggcgtgtgaaagaattaccgcggaatatgatttcttctccaaacaaaccaaattaaaccaaagttcatgaccgacagaacgaaaatgccagagcaagcaaagcaagcatgcatgccgcattttcaagcagtggcagattgcatatcgtggaagaagggccaagcatgcagcatgacacgtcgttttcttgcctcatccaacggcaacgtacaggccggctgctggtccatatgcgcctctccctcctctcttctgctcatgcatgcacgtacatgcatgcatatgctccatcatcgtttcatactatatccgtgtttcaatgtacgaaactgttgattttttttataatcaatctttaactattaattttatttgaaaattttatacaaatataaaagtatttatgtcatgcttgaaaaatatttaatgataaatcaaaacacaataaaataaataataattacatatttttttaataaaataaatgatcaaaaaccaacgacatctagtattaaaaataggaggatatatctcttcctgtcaagcagggcccacaggtcaggatagctagctagtcctgtcgatcgccacgtcgtcgtcaggcacgcatgctgccggcggccagaaacactgcatatcgatctgcaggagtagcactgcagggcagctagctattcccaccgcttctaaattgtaataacatattcgttttatattataaattatttatatttttctctaaataaaaatttaaaattttattaagtttatagaaaaatttagcaacatttacaacgctaaattaatggacctgttcgactggtattttttacagctacatggctgccagctgcacagcaacaagcagcacggctgcagccacacaacacaaattaccgctgcagcctgcagcagcagcagcgctgctgaacggcagccgaacaggcccaattttgttaaatgtaatattgaatatattttaatattatatttgtttcaggttgaaaatgttattatatttttttttataaatttgattaaacttataaattttaactaatagaaaaatcaaagcgattcattaatacgaaacggagggagtattattctaaatctattaggatatatccttcatccaatttcataaatagaaatcagatatcttatttagtttcgtaaccgaaaatacgcttatatttttgaaagtgaaccgatattcgaaacgatcaatacaaatacgaatatcgatgcctaggatgagaaagaattgagatggcaaaagatagcatcacgaggaggatgatgccaaatacgtaggaaggggtgaccgggtgacctgggggaaagagaccaaagagggagcaatggctaagccagctatatgtggcgcatgcaatgccatttttgtcactttgctccttggatcaggggaaaaagaaaccttcttgtgtcactctgtcagtgcttgcatgccaaattgactattgcattatacaaggatttttacatatgcatcccaggtcggtgagcgtgcatcttttatataatctaaaaagaaactctgtaaaatttacttatttatctctaatcaaatttcacacgattgactgattatttggaagattgttactcatgctctaccagaaccgtgcagcccagtctatccgacaggcaaacacactgactgttgagaatataggcatataatgatttaatatattccataaataaatcatgacattacatatgtatactagcattaacgcatcattaaatctacacatgtaaattaaacagtaaaacatgaacagatcaaatacgcgcaacatgtcgaacacgtaccgaggtagcggaaagaccggttgctcggcaggaactactcgcggttgcgagcgtcgacgaaggcgcgcagcacgcgagcggataggaaggcgagccgtcgcgaacgaacaggaagcagtcgcgcgaagcgcttcccaaaaaccttattgccgccttctcccggtgcaggacgtcgaaggcagaggttccggtgacctgctctcctgatcgccggtgcacactggcgagcgggatggagtagtctacgagcgacggcgcaacacagaggaggaggcaaaccctagattgatttcgcgtgtgttgcgtgaaggcggcgacacggtttatatagagataggtggcttgatcaggacgcccgcacgatctccactctgcgtaaccgagccggataagtcacgcgtaacttatccggactctacgccattttcacgcaccggatttttcggaatgtttccaacaacaaaacaaatccgaattttcctgcaacaaaacaaaactgcaaaaagaggctgcatctgcgcaatggtgaggagccaattttacggaccattcgatgcgtacgtcgtgcacgcgcgccgcctgcccaggcaaggcgaggcgagcgagcgcgcgcgtgttccccctcttctctccaccacacatgcttcaagtggctaggagggcatcctcccttttaaggaggtctccctcttctagaataagcaaggtggtactaaactccacatgcatgccatcccatgaggtgggcttttgtgatttcccaaagaattaatcttcgaatgggccttagcccatctattaattccaacaatcccccaccaaatctcaaaatcccactgagatttgccttttccaatgtactgtttatataccagcggttcgatggagaccgattaaggttgaacatccacctagaactccaagctacactaactcacaacttgaacaatggactacgccttgaattgcaagtcttgtgcaagcaagtttcactcagagtcttatctggtactagaccgtctgtagactacccctcgggtggagcgtataagtcatactcctaggtttttagtaagcttcctagaagattcacccaaaatcttaatagactgcggccaacagtcaagcttacaaaggtgagttctttcaagaatgctctgcaggacaacatcttcgctaattaaagccaacagaactcattaaggcatagccaacctgccttgcagctcacgagagtacatgtatcttcacttagagagggtatagattggtactctcctctagtttactaatggtttgttcttcccaggttctaattcacgagatctccgatcacatagactggattaccaccatagtataactcacatgggtctcaaacccatctccttcgatgcattatctatcacatttcgtgatagtcccttcgtgaagggatctgccaggtttcaagctgtttggatgtaatccaacgttataactccggagtttctcaatttcctaacagacttcaatcgtcttttcacatgtctagacgatttcatattatccttagaactattcactttgacaattaccgtttgattgtcacagttcataaggatagccagcaccggtttttcaacaataggcagatccattaatagatcatgcagccattctgcctcaacagtagcagtatccagtgccgtcagttctgcttccatggttgacctcgtcaaaatagtctgtttgcaagacctccacgaaacagcaccaccacccaatgtgaagacatatccactagtggctttgatctcatccacatcagagatccacttagaatcactatatccctctagtaccgcaggatacccagaatagtgaagtcccaattccatagtacctttcagatagcgcattactcgctcaagcgcacgccagtgatcatctcccggattagaggtaaaccagctcaacttgctcacagcaaaggagatatcaggcctagttgcactagccaggtacatcggcgagccaatgatttgggagtattccagttgattcctagcaattctcttgttcttgcgaagcaacaagctaggattataaggtgttggagaaggcttactatcaatgtagccaaagcaattcaagatcttctccacataatgggactgcaaaagtgtaatctcattctcacctctaattagcttaatgtttaagataacatcaactactcccaaatccttcatatcagaatgatttaacctcatttatcacctcaaggtttgtcccaaatatcagtatgtcatcaacatacaagcacagaataactccctcacccccaccatggcgatagtacacacatttatctgcctcattgactgcaaagcctgcagatgtcaatgttttgtcaaatttctcatgtcattgcttaggagcttgtttcagaccatacaaagacttcaacaatttgcacactttgccttcttgaccttcaactacaaacccatcaggttgatccatatagatctcctcatctagctctccattaagaaaagctgtcttaacgtccatttgatgaacgagaagaccatatgaagctgctagggaaagtagcacacgaattgtggtcaatctagcaacaggtgagtaagtgtcaaagaaatcttcgccttcttttttagtatagcccttagcaacaagccgagccttgtacttttcaatagtaccatcaggcctgagcttcttcttgaacacccacttgcaccccacatgtttacacccataggccgctctgtcacctcccaagtcccgttagcgataatggaatccatttcactacggacaacctccttccagtagtctgcatcaggagatgcgtatgcttctgaaattgacttaggagtgtcatccacgaggtacacagtgaaatcgtcaccaaaagacttaaccgtcctttgtcttttgctccttcgaggagcttcactgtcatcctcctcagtgacatgttcatgtgtatgttcagtttgttctggtggtgtgattgaactgagaattatttcagagggttggctagaactactatgtgtatccttcattgggaaaaagctctcaaagaaggtagcatcacgagactccataattgtaccaacatgcatgtcaggtacctcagatttaactattaaaaatctataggcaatgctgtagtgagcatatcccagaaagacacagtccacagtcttaggtccaagtttgcgcttattcgttattgatacgttgactttcgccaagcacccccatgtgcgcaagtaagaaagtgatggttttctcccaatccatatctcatatggtgttttgtccttatttctgttaggaactctgtttaacacatgattcgaggtcaacaatgtctccccccaccatgccttaggtagtcctgcggtgtccaacatggcattcaccaagtcggtcagtgtgcggttcttcctttcagcaatcttattagactcaggagaatagggaggcgtcctctcatgtataatgccatgttcctcacagaataagtcaaactcgtttgagaaaaactctccaccacgatcagacctaagtctttttatctttctgtcaagttgattttcaacttttgccttataaattttaaaatagtctagagcctcgtctttcgttttcaacaagtacacatagcaaaatctagtagcatcatcaatcaacgtcatgaaatatcgttttccacccttcgtcaacaccccattcattttacagagatctgagtgtaagagttctagaggtgccaagtttctctctttagcagccttgtgaggcttgcgaggttgctttgattgcacacaactatggcacttagaacctttgacaatggaaaacttaggaattaaacacatgctggaaagccgagacatcaagccaaaattaatatgacataaacgtgagtgccatacattagcctcatcatccacactgccacaaatatggttcacagacttattgcagaaatcagaaaaggaaaagcagaacaggcctccgcactcataacctttaccaataaaatatctatgtttagacacgactactttattagactcaaaaaccaacttaaatccgtctctagtcagacgggagccactaacaagattcctgtcgatagaagggacatgctgcacgttcttcagctgcacgatctttcccgaagtaaacttcagatctaccgtgccaacaccatgaacagaagcatgtgacccattccctattaggacggtggaaccccatgcgacctgataagaagaaaacaatgagatgtcagcacaaacatgtacattggcccctgtatcaacccaccaattagtagactaattaactgaaaaaacagtaggtaaattaccatacccgcttccatctccagtgttgccaatggtcacattggcagacttagaggtctgccctgcaggtgccttcatccccttgcattgtggacacttcctggccagatggccaggttgaccacacacaaagcaagtcctcttatcctgattaggattgttgttgttgttcttcttcttgaagttggtggtctgctgagctttgtatttccccttgctcttgttctgggccttgtgcacaacattggcagtggactgcccaccatcgcccttagacgcgacatctttttcccgagctttctcctcaacatcaagagacgctatcaacccctcaacggagtattcctgtctcttgtgtttgagtgcagtaccgaaacctctccaagatggaggtagtttcgcaataatgcacccggccacaaatttgtcgggtaagacacacttaaggagttcgagttccttagccatggtttgtatctcatgagcctgttcgactacagaacggttgtcagccatcttgtagtcatgaaactgctccatgatatacagatcattgctagcatcagtagcaccgaatttagtattcagtgcatcccacaactccttagcgtcggtcatatgcatatacacctcgaccagacgatcgccaagcacgctaggaatgcatcccacaaagagagtagtggcctcatcgaattctttctgctgatcagcattaagaacgcccataggcttgccagtactcacctagaagcatttcatagctgtcaaccatagagtgaccctgatctgccatctcttaaagtgcacaccggtaaatttatccggcctcagtgcattggcaaaaccagccatagtaaactcacagtgcctatcataaggtttttggattgttgagaatataggcatataatgatttaatatattccataaataaatcatgacattacagatgtatactagcattaacgcatcattagatctacacatgtaaactaatcagtaaaacatgaacagatcaaatatgcgtaacatgtcgaacacgtaccgaggtggcggaaagaccggttgctcggcaggaattactcgcggttgcgagcatcaacgaaggcgcgcagcacgcgagcggagatgaaggcaagccgtcgcggacgaacaggaaggaagcagtcgtgcgaagcgcttcccaaaaaccttattgccgccttctcccgatgcaggacgtcgaaggcagaggttccgaagacctgctctcccaatcgccggtgcacgctggcgagtgggatggagtagtctacgagcgatggcgcaacacagaggaggaggcaaaccctagattgatttcgtgtgtgttgcgtgaaggtggcggcacagtttatatagagataggtcgcttgatcagggcgcccgcacgatctccactctgcataaccgagccggataagtcgcgcgtaacttatccggactccacgccgttttcacgcaccggatttttcggaatgtttccaacaataaaacaaatccgaattttcctgcagcaaaacaaaactgcaaaaaggaggctgcatctgcgcaagggtgaggagccaactttgcggaccattcgacgcgtacgtcgtgcgcgccgcctgccctgcccaggcgaggcgagcgagcgcgcgcgtgtgttccccctcttctctccaccacacatacttcaagtggctaggagggcatcctcccttttcaggaggcctccctcttctagaataagcaaggtggtactaaactccacatgcatgccatcccatgaggtgggcttttgtgatttcccaaagaattaatcttcgaatgggccttagcccatctattaattccaacactgacacatagcaccccctacacttttattctcacttcgagtaaaatgattaacttggaagtagtattgagcccatccaacaggtagacccacttatactttcattcgacagacatgttcacttacactttcatcatcatttcgtgtaaatggttaacccaaaagcgatatggttggatggacaacccatcctccagaaccgcaaaccaaccatccgtatagcacctcatttacactttcattctcgcttcgtataaaatggttaatccgaaaatggcatgatttccttaaaaaaaggaagtggtatggttggagggcttataagagattctactcttgctcatataaatcaagggcacacaacgctcatgggtaacataggccacatcctaattgaaccgagatatcactcatcacaaattaggctgtgtttggaaccctgggttcccaacccctcccaatcgtattccgcgcgcgtgcttttcaaactgctaaacggtactttttttgcaaaaaaaaatctataggaaagttgcttaaaaaatcaaattgcatgttgggaacaaattattccgaacacagccttaaaatagatcttatcatgaatttgtcatataatataagaaaatagggttaattacttctttcatataatcacatcttatttaattaattttcatccatccttatctccaaccaccttcactcgttacatattcctcatttaagtatttaacgagagatattatagtatattttttcttgtttacctaaacctcttcaaaaatcctaggacattttatattttgtgatacttattaatttgataagttatgtcaaataaggagattctcactcgtgacgaaaaggaattggaaaattttgctagagggtattgtgacttcgcgtttttagttgtagaacaccacacgaagtgatttttaggggaagacactttggaagcgtggaaattagctcatgggaaccgcaaccattagaatattaatttttgattgaataagagagaaatcatgtgaaaattatgaaattaccactgggcccacatgttaggtttgccatctctctatccctatctctctctcgcacatgaacccacatgctgcctgctgtggaaggagaggagctcttgcacgcctagttcattgcatcgccaagcacacaataacaagcctaccttcatcggcaactagttggaattggtgaaccattggatctgactatctgagtaggtgcagctccactttggtcccgttctgctcgtctaccaccacctgcgcctctggccggtcaccgccccaagctcctccttgcatggcgcctgtgggttgtggtaagagtcgtccttcgcacgcgatcttaggtctccaccacttgtggcgtccctgctttcaagacccattgtcgggagctggatcgtcaccctctgactatcttcatcacagtcgcacacccggggggaatggagcccatcctctccatgactctgcttactcccatgtcggtgcatggtttgggccccccctccctcgctgcttacatgctgcagcgtgaaccgtgtggatgcgccacacccataggagcgcgccgatgccgagtggactatgacagatgatgtcgagtaggagctcatctccttccacgatccaccattcccaaccagcatctagctcgcctcgccgtcgccggtcaccgagacactctctcacctttgcctcctgcgagagtgagaggaatagaggaagtagatggggaaaaagatagtagaggcttatatgcggattccatgtacgagagagagaaggatagagagatggcaagcctagcatgtgggcccatgggtaattcagaactttcacacggttttttctcctactcaaccaaaaattaatattctaatggtgtagtgtccacgagctaatttttatgtctatatggtgtcttccctcaaaattaactttgtctgatatcctacaggtaaaaccgtgaattcatgatgttgtctagcaaaatttgctaaatgaattactacctttttgctaaaccaatactactagaagataattcccctgtcaggataaccatcggtcatttatcatgtcattctaatcttgtggctattttgctattggttcctcgacatcggcagaaaattatctcacgttagtttaataattttgcttgcagaagatataactttttttgccccagtactatttttcggcttacggattatgaattatatcacaggcatattattttacttaaaaatcataggcatattttactttttaagctcctaaacaataatttctctaaaaaatttctccatcagccctccgaaagaacatttttatataaaattttcagctttccaatattttatttatttatttatttatttgcgcccttaaataattgttatagactagtttcatcccacacccatcgtgggtcgtgcatcaacactttaggatggcggagaatggaaggcatttgcagtggtcatcagctagtcaagatggtcatttaattcaaacaggtacatcaatgccataaaatttctttgttttggcatatctagaacacatggatttcacaaggcaaaattaaaaagattaagataaagggaatcttttgaattcaggcaaaacaagattgaaatatagttaatcttctcaactcaggccaaaaattctcaattcactggtttacctgctcatagcaatcgtggggaaagtaagaaggcattgagtatgtgagttctgatggatacccgtttgatgtgcttcaggattcgtgcagtcgtcacatgggagtgatgtatagaagctctgtttaacaccaaacttcatctgagaaaattattacttcctccttttcacaatgtaagtcattctagcattacccacattcatatagatgttaatgaatccaggcacacatatatatctagattcattaacatcaatatgaatatgaaaaatgctaaaatgacattgtgaaatggaggtagtacaaccaataagtgaaaatgttactttcaaaacaattattttagacaggagagactagccagacagaaatacagaacaatttgggtaataatcaatgagagaagcagcttattaaatggtttgcctggtgtggaaatagccaacaatagtcatcttacaacagacaccattatttatctatagacacatatggacatcagactagtgtaatactacaagaatttcatagaagactacatcaacatatgtacattttatagccgagaagtaatgtttacgcttcgcagcaaatttatctgcatacaacaacacggtagcagtttggagccttgggagttcattccacgtgtcattgtgagctcaatgaatcaataacattagtaagttgatacaagaagttgatagtgggaagggaactcagcttcccagtttgaaggcatccacaaaaaggcccagacatacgccggctttccagtagttcaccattgcaatcaatgactggaatcgtccaggaggtctactcatcggttttctgtacataagcatgccaattccctctatggcagccactacaacaccagccacaagaacatcccagtcaccagtctgccctaggattgttgccaatgcgttggcggtatagaagccaaacagcacaaggaatatcttcgtgggggagttgcttctggcagagttcagcttttcaagtagttccctcccagcagcttggatgagccttcccagccttgttctaccaagaaagccaccatcatcttcgaagtcttggctatcagcattagatggtccacctgtttccaaggcaaatactggcttccatctagaatttttcatctggtaactatagagtgcagatatcaagtcaactaccaaatcttctgcatagtagagatctgaagaaattgattgcatcaatcttttatcttttctcaatctctacaaaccttcagtcatgaagctaactagtaaataattccacaaaggatggacacatcagcaattcatctactcccatccccaaaagaatataaaattggtaacctgactagtcaaatcttcctaagtttgaccgccactacatagaaaacctatttatatttatcatgtgaaaaaagtataactaaactggctcaagaaatattttggcaccgcaatacatttacagttattttgccaacacatatgacattactatacaaattgatggtccaatttatgcacttgataccatatcatgtccgaagtgtcgtatatttttttaacagatggattacttttattgtttctatttttttattgaaaatagtttatgcatataataggtagataccatataaattgaaaaatgggtactatcagtaacaagattgactgtccacaagttcttattatataatgattacctgccaaattcttgtattttgtatgccttgcggcataataacatttctgtttgaagatgctaaacgagatctaggtaggctacattttgcatccatgtcaccttggagagcacaacttgaacccatgcatttcctaacaacgtgcggtgaaacctaattacacttcattgtctattccattcttttgtttgggtgagcccttattgaattccttttaaacagtcaataatccaacctatgtcaactgaaatgtatttcttcaagtgtccagcttatatcaacaaatatatgattcttcaatataatctgactgatagtcagcaaagatgcattgtataaatgattgaactcatcataaacataaaaagatgtactgaaagctagatctacttatcaatggtgccaccgagtagaaatgtgtatgcaaattaattgtagtagggggaaatgctgttcatagatttaaaactttcgtaaaccagctcctccaaaattcctgttgacagaaaactgacccaaagttctggacgagtccaatggaacccaattcccaattgatttttgggatttttttttttacagaaatactaggtagagaaattcaatacgctggagaagagaagagaagacagcgagcagcggcgtcgggggctaacctgagcgccgctccgcccgtcgtcgccggccacgagaggctgcaggtccggcggaggagcgcgcggccgcagagaccgccgggtgccggccgaagaggggcgcggggagggagggctccgcgccgcagcggcatgaccggcgggcagcggcgccacggggcctctgtcagtctcaaggcggagctaccgcgacggcgacggcggcggcggcggcggcggggtgaggcgatgcgatgcgaagtagcctgtggttgacagtttcgatggtctagaatcgcgccttctgttccgtacgtggatagttgggccgagaacttgttgggctggagcccaactctccagttgcaaaacgtacctgtgggtcagtggcgagtggcttctctccgtcgctaccccggggacgtcgcggcggtcaagcgccgcgaggcgggcctcgcgggcggcgtcggaggcggtgaggatgcggctcgggtgggcgagcggcgggaccgccagcccggcggcgtccctcagcgcgacgcagtggtgcgccgagctgtgcgtgtagtcggacggccggatcggcgccgacgacgacggacgagcactcgccaccgccgccgctttcttcttcccgtcgccgccgccatcatcctcgtacgcgtcaagccgcaccggccaactccaaatcgacgctcaagctcaagctccgccggccagggcggagagggagagggccccgctggcggcgcgaccggcgggggaggaggaggaggaggggaggggaggcgcgcgggcgggtggcggcggctgaggaggaggcgccagctcggagcgggaggcggcggcggcggcggtggcttggagcgggaggcggcggcgttgtcgagaacgggagcgagagacgcgttcggtcgcgagcgagaccgcgtcaaagggcagagaagatgacgattttgagggagaataagttcaccggagattttttaaagtatcttaaccaaaaaaaccaaatatttactcctaaactctcacaaaccgttcactggaggtccctcggtactatttttgtccggtttttctgacgtggcattctagttagcaaaaaaataagaataaatatgtggggaccacatgtaagtgacataaaaatgttaggtcaacaatcctagtcagcactgatattctaaatcgcttttttctttggcgcacagggggagcaacagcgacacgcatccgaaggcaggcggagcagggacgcggcggttcggcgggcgaggtggcggttcgcgagtgcgactgtgatgagcacggcagcgaagcggcggtggagcggtggtagcgggcgagcagcggcttcgggctcgggaggaacaggcggaggggcggcagcggtggcgcggcagcagctggtgccggccggagagggcggagatgaggccggcgggagagggggtggagcgccgcatcggcggtggtggttgagaggacgggcgcctcctccaccgctgcctccctcgcgggaaccgtccagcgcttgccctcggcgcgccagagcacgtggattccacggcagcgggcgccgcggcagggatcgccaccgctatggcggcgcatgtggtgtgaacacccgtcgacgtcatcagccagagcctcatggtgcaggggaacccgtgcccggcctcccactaccgcggcggcctcgacgtcttccgcaagatcgtggccgccgacggcctgtaccgcggcttcggcatgtccatcctaacctacgccccctccaatgtcgtgtggtaggcgacatactcattgtcgtagaagacgatttggaggaggcgcctatcccctcagcccctcctcctccatcgctgctcccccctcttccgccggcgtgacacgtggagaggatgggagagggagaggtggtcgacgggagatgactagatgggggaggggaaaggtggccggctgctgccgtgctcgtcctccgccgctctgcccaccactcgtagaccgttgccgcgctcgctcgccgccagcctcccacattcacgctcgccatcgtcactccgccctccgccggagagaagagagtaaagagaagagaaggtgaagaaaagagaagaaaaaaagatgtgcagctgacatgtgggtcccacttttttaattttattttctaactaagatgccacgtcagcaaaatcggacaaaaatactgccgagggacctccggtgaatggttttgagagtttagggggtccatatttctggttttgtgattaagggacctcaaaaaatctcgttgttaagtggagggacctccggtgaacttattccattttgagggcatgcacgtaatttcacgttggctggagagctcggctccgtgggcttcggtgacgcccactgtgggctgtctgagtagccaaatgtgtaatctggtttgaggccacattggattgtgtagcttgtggcttttgaagttctttaatctatttggagtaaattgaacccacagtacaacaacttggtaggtggatgcgatatagaacaagaacttaagatttgaacgttcgagtacagtaacttgacaattgggtgcgatctagtatataagaacctgatagttcgatattttggtgcatcaacttggctaagcatatgctagatgagttgtttcacgatgtcaatatgctattagacagtaatcctacagatattaccttaaatattgaatttaatctttaagaattatattacatatatagtttacatccaattatctttaagatttttttttgttttcttcatcttctcaaatattaactgaaatataataatttttacatccagtttaattgactttcagttatgggttattaggataaaaatataaatatgcttatacaaatccatgctagtatattgtcaaaataattacttaaaaatgaatctatataaaaaatttctccaaataattaagttgtcgcataatttcttagtttactgtatcaaaatcgtacctatcttaaaagtttttacatttatataatcatttataaagttcttatactaaattgcacctacctattaagttgttatactagaactctcatttctcaagtagttcttataccaaattacacccacctaccaagttgatgcaccgtggatgcaatttactcatctatttggcaccctagtctgaacagatatagtggcgcattggtgtggtaggtggagagtggtgtgtttctatttctttaatgcccttgcaaattccctaatggtcccaacaagtcaccgaaattcaacgcgcgcgaaatgccaaaaaatattggtgctctgtctcatttcttcgcacaccattacaattttattttacagaacctttcctatgaccccaaatttttacactaacgggtacgttcacgtcaggaaaactcatattactgacggtatctcatccacgtcaaggaaaattccaattgttccgacggttttaaaggatcgtcacacaaattattttttctctgacagggttttggactatttgccactctcccgaatggcgtgttctcaaatgccactctcccggatgacttcgctattttgccaccggagatagaagatttcttgcctgtgtgccatttttgagcctgcaaggcaccacgtcactcgatatgaggacaaaataattgtcttaccctttttcttcatttctcctcctgtcattgggctccggtgagctccccgcctcgcactcctccctccttcgctctgctccttaccttcccggcccctactccattccactgcggccaacaccggcccctgtcttttcttttgtggcctcatcggtgcctcaccccatcaccgtcgacttcgcattcctcctcacagctcttctacactctcccccgatgtcggcggctgcgccaggtccaccctcagggcttcccctaccttgtcattctccacccagcgccaggaggtcggttcggcggtggtggtggcggtgtcaccggctcacatacagggaggaaggttggagaagagagacccgagctagaggaagaagaagggcaagacagttattttgcctttggatcgggtgacgtggcgctttgtaggctcaaaaatggcacacgagcaagaaatcttctctctccgatggcaaaatagcgaggacatccgggagagtagcatttaagaacacgccatctgggagaatggcaaatagtctaaaaccccttctctgactggtggttgcatgcatgtcactgagtcagtaaaattagcgaccgtcaggggtattctaatttctgatagtgtaatagaattaaacattctgtgagtgtatgatttaaaaaataataatttaggagagaagagatgttaattaattgtcatgcatgtatttatgttttatattatgaaacacctttaaaaagcatgtgtcctatattttggaatggaggagtactactacatgcaagcgaagatcctacaattcaagcaaagcagtccactaaatcgccgctcgctgtaattgcgtaactaatgatgccgtcaaacaatacatgtacgcacttgattctacaagaactcagaagaaggctgcactacttgcagtttgcagccatctcccggctagagcgggcctggaagacgacggtgggctcgccgaggtcgtcgtcctgaagctccccatccacgtgtcatcgtcgtcgatcgtcgccgtctgtggcgtacgtcgagcaggttcaggggtttcctccgtggcggcgtcgatcaagtataacatgggacactttctcgtcagcccgagcttctgaatgggtcttggattattatttaaaaccaccatgtgtgacacctcatttgtgcttttttttaaaaaaaaaagaaaaaagaaaacagcatcgatgatataattaagtacagactttacaaataagtgcacaaataaagcgaaagggcatatagtatagtggttgcagttatctgagtagcaccccaacgttctaagttcaaatcattatatgagtgaattgtctcaatttaaaatgggaaaaagtacgaattaccccctgaactattgtggttgattgaattaccccctaaattcgaataccaaatatttctcaccctaaacttttaaaactggacgaattacctccctactccaaaccataacggttttggtcctacgtggcatccatgtggcgctaacgtggcaatctaattagaaaaaaattaaaaataacataggccccacatgtcatatggagtagtgcactagtgctaaattgctaatctctctctctctttcttccctctagggtcgcgggtgcgacgtgatggggcgaaaccagacgctgtggtggggacgacggggatggcaggagccgaggaggagctgtgctcgccggcggagaccaaggaggagctgcgtgccggcggatgcggatgaggaacaacgcgtgccggcggaatcgaggaggactcgtcgcggtagaccactcccacttcttccaatgccttcctcggcgccgctcgttgcccgccgcgcaatcctggtgatgccacagcccaccactatcctcgctgcctgtgatatcagagagatgagagagagagagagagatgttgtagccctccccgcgacgcaccacccgccgcctccagcgtcctcctcggcaccacccaccgcccaccgcctccactatcctcctcgacgcggcctaccggccactgctccttccccgttacgcgacaagcttcagcggcggcgtagtaggattttgcgcgaaggcggcaacgagcccgcctcggtctcgagctccctttgcgacagcgggacgtggagcgaggcggcggcggcggcgggatcctccttccctcggtcgcccgagcgacctccgcctccgccgctagcaactgcccccgccctcgcctgctgccattcttggtgtcgtcgtgtgctggtgagctggtgaggagaggagggagaagatagagtggggggaaagattgggatagagatagggtagagagacatagagaggagacgagaactgacaggtggggtccaccgattttttattaaacgaattgctgactggacttccacgtaggaccaaaaccatcgcagattgagctagggggttatttgtccagtttgcatagttgggggtgaaggatgtctgattttgcagttcggggagtaattcactcgaccgtgatagttcggggggtaattcgtactttttcctttaaaatggctgcatacattcagttacatgtgccggttttatttagcaagcacaaaatggatgacccgagtgcacggtgtaggggaaaacatcttctgagtgatcttaactaggggtgggcgttcggtctaaccaaaaatttcggtatcggtcttcggtttttcggtcatttcggtttttgaaaagtcaggaccgaatttcatccaaaaaaatcaggaccgataaatttggtctcggttttttcggtctcggtctcagtctgaccgaatttggaggagccgtgtaacatcctcaaattttaacctaaaatttgactgcatcatgctggcttttgattaaattagtgtgttttaaaaatctatttgattcttaattggttcaagtattacttctttagaaccctactaatttactctaattattccctttactccaaaccttagtgaatttgagcaaattctctcaaatttcaaactatagattattttcttagcttaccctaatattagtgaggatttgctacacttcaaaccctagtgaaaccctttcaaacttatagtttaaattcattctttcctagggaaatattcaaaaattcctaaatttcactgttcatcgcacacaaggtgctcgatgaaatgcccagcttagctagagcagcccaaccaccacccaatcttgtgcaaagtctagaattgatcctaggggaccacaccccactcaaaaaccgtggatttctttgcttcttcctccccttcacacgcgccgcgcgggcatccgacttagccgcgcgccgtgtcgccacgcgtcggcctcgggaccgcttgcgcgtgcccgaccgccttggcgcgccgtcgcccgtccgacgccctcagaccgccgccgccgcaccaatcttgacgacgacaaagccgggatgactaccgccgcaagaaatcgtcgctcgacgccgtgcgctccaatccaagccgctgtcgagtgcgatttcgcttctacccgggatgaatcgcgccaattctttccacacggttggattgaagatagacggtggtatcccctctcacaattcaaaccattcacccccgagtcggccgttttcaccctcgccgccaccgcgcgtcgtgcccggattggcgccaacacgtcgccagccgatttcacacgcggtcaagccaatccttcgctggtaagtattcaaacgtggcctcctgccactcaaagtgatcttggccgccctctcgcagcctctgctgccccagccatatccaatctttgagctcatccatggcgatgacggtgttcgagctcatccgctcctcctagccctataaataggaccccaatcccttccttgtccatcatcgatcatcaacaaccataaccccacaaccccgaagctctgcttcaccaatccatctcatcaaccaccatcgcccgtcggtcgaacaccttgtgcgcgatcgactccacacccctccatccatcctccgccctaaatacctcttagaacaccttatatcaactatgttctagtatattagaccctaaccgaagccctgcatcgagttttacctcgccgcaccaagccgagcaccgccgcccccgcgctgctctattcttcgccgccgagaagtttttccgaccgtaatccttcatctcggcatatctcggtgagttcttccgtttcaaccatctatgtactccctagattccattttagcaatccctttgcactaccatgccaccctctgggctgccgacgtgagcacggccaaggcctatggaggcgctcgtcggcaagtattctccgcgccttgccaaagattgacaagctatcagaatctatctaggtacctcgtagatgctctagaacccctcccctagccatgtctaactcatatcacctcgatcactattacggcctaactgtaccaccgccgccctagtcgctagcctatccatacatcaaattaacccctccgccgccgctcgccatcgccggagaaccccagctccctcccctccttggctgcaacccctttccccctccatcgccgccgtaatcgctaaccctagcgccgccggcccgatttggggaacggccggaggtagaagaagagaagagagagagactaacaggtgggacccgcacatagtaacatttcacttttagttgattttcaaactttagaagcccatatcttttaaaatatatatccaattccagtgaaacttggaccaatattcttctaaaatcattctctatcttttgagcccctttttgctatttttacattttattttattttctctatttttcttatttttggatttaatttgaatttcttttgaatttgaattttatatgtctaaccctaggtcttgaggattcttctgactcaatagataatatcaatcaatctcaggacaacgagcaagggaagttaccatataccttttgatcatttaagcctatattttacaaattatttatttatagccttatatccaatattctattttctatgcataaatcaatcatagaaacccagataatttagtattgcttactttgcttacaatctggttaaaataccttatacttagattgggagagtaagtaagatttggttgatttccgggtggctagtactgtctcgatcgatataagttttaccaggtacttatgtcgaacgaacgggtacgaccgcagtttctagaatagggacatacctagttattatgttaattagcaatatggcacctctgtatagtggttcttatttttaagtcctcacacaggaggcaactatagccgcgaagggcaactttaaccattaccatgtacaggtaaatggtttgtgatagtcgactataaactatatggtatatttctaaaccctgatcgagatgacgtggtgtcatatgatcagttccccttaaatacctcgggaatgccagaactcctcttgctgctgttaacaacacatttagagcatatgaggatatgagttcatggaacaggtgccacaattgttaatgacttaatattgggccatgactaaagccgatgattatcagcaagtcgtggactgcgggtaaagcgtacatctgctgcagtagaatatctttgaaactattcgaatagccgtactcatggagttgagtaccgggactcatatggtaccctggttagaaatctaaagtctatatgttttataaattctaactataactttcctagattgtttattactgctttttgcaaagaaccctactatatactaatgcataacatatttccatgataacttactgagtgttgcgaatactcatccttgctcttataacccctttttcagatctgggtcaagagaaggacccttatgactattactatgatgaccctgataacttagagaatccctaaaggtcatatctccctagtcagaatgtatagaaacttctgctgtgtattaattagttaggtgagtacctattattataaaacccttagtattgtaaaactttaacgtatgcaatgaagaaccagttatactgtatatatcaatatttactgatctagggattgatacattaattctagtcagatccaagtttttagtttcgggctccgacaagccaaggcagggccagctgtaggtggcacacgctgtcgacgccgatacggtggtggtcggtgggagtacggtcgtggtggaggcggaggatggatccggcggccggcgaggcagcgtggaggcggagggcggagacggcgccggcgatgtggaggcggaggtggcggcgcggcgcgatggatccggcagccgctggcccggtgcgaccggagaggcggcgcggaggcggagggtggagacggcaccggcgatgtggaggcggagggcggaggcggaggcggcggcggcggcgtgggatggatggggatgcggagggctgagggcggtggcagcggaagcgtggcgcgatggaggcggtggcggaggcggaggcggtgcggccgcgcgggatggaaacgagggcagcgcgatggggatgcggagccggagggtagcgcgatgggatggatggggatgcggcctgcgggtggcctctagggtttagtgatgtattgggcttattgggcctcctagacctattgggacacaattcggtttctcggttaattcggttaactgatcccaataaccgaattacccgaacaaatttcggtctttgacaggctgagaccgaattactaactgaatttctcggtctcggtcttattctgcccacccctaatcttaaccacctactctctccatccctaaatataagattttgattggatatgacatatcataatacaacgaatttggatatactccctccgtttcacaatgtaagtcattctagcatttcccatattcatattgatgttaatgaatttagacatatatatctatttagattggaaaatgctagaataacttaccttgtgaaacggagaaagtactaccgtccgtaaatataagggattttggttggatgtgacacattctagtacatgtgtcatatctaacatgtattaatctaacatgtattaaatctaaccaaaattctttatatttagggagagagagagtaatctttttatctctcaaacattctgtttgctctttccccagctctctcaaggcccagccggcggaaattcacgttgctcctggtgcattggacaactagttttagaactgtaccgcactaaaattttctccctcgaaaaaaaatatattcacgttgtttttctgtaccttctacacgactcacgaaacagatcggccggagaacaagccgatgcaagtaggggtgggcacaaaaataccgaaccgaaagaccgaactgaaaatatcgagaccaaaaccgaaaaaaccgataccgagaaattcggtcatcaattcggtcttaggtagtgaaagaccgaattttgttcggtcaattcggttagtctcctcgggtaaccgaatagaccgaattatcaaaaatgtctaaatgcaacctataatccagtatgtttaataggattaaactctaattttcacatccctacttcttcttggcatgcaacctaataggagtctttactcatgagtgcttacgaattttttttgtgatttttgtgttgaaaaattccattatttctttgcatatatgaaaacgttgttgaatttcggtcaggaccgagaccgagaccgaatttgttgatcctgacatttttcgctgaaattcggtcttcacttttcaaagaccgaaaagaccaaagaccgagatcgaaattttcgattggaccgaattcccacccctggatgcaacgaagcagtgctactcaaagtaaacagtccgatcgatcatcaatcatgccagaaatttaagaattcaacccagcgtttcaggccgaatataatccaaaattttcaaatcaaccatctactactccgtcataaaaaaatacaaactctagctacgaatctgaaaatacgtgtctaggttattaattaggattagactttttttttgagacggatagagtacatatgcaagcaaatactctctttgaccttaaatatttaacgccgttgatttttttaaatatgtttaaccgttcgtcttatttaaaaatttaagtaattattaattcttttcatatcatttaatgcattgttaaatatacttttatttatacatagagttttatatattttacaaaagtttttaataagacgaacggtcaaatctataactaatataaatattcggatttttccggtcgtcacctcatccatacggtgatttttcgtccctcccccccaaaaaaaaaaacctagccggaatttcatcatcacacaagtagaatcccacattgagcacaccttctctccaatctcaaatcatcacaatccaaatccaaatcaaaagctaaatcccagtccaaatataaatcgaaatcattagaaaacatcatattaacacgagatgactaggagagggaggggcgagccggaccggaggctgcagcgcgttgctgctcgccacctcgccgtcggccacggacccacccgccaacgccgccgacaccgccatcgccgccggatcaggggcaggagggaggcgaaaggggagaagggagccgccgccggccagcgaccgccaccacctccggatccaccggcggctaccacagccgctgccgccaccacctcgggatctgccgagagagtggtgcggcggccaccgctcaacgaggagagaaggagccggcggtggggagagggagcggcgccaccatcgccgcgccgccgcagccgtccgccgcgagggagtgtgccgccgctgccaccgctgctcgcaggagggcagggcgccgctgccgccgtcgtcgccgctgctcagtggggaaggccgccggcggtggggaggggggcaagaggcgtcgccggttggggaggagcgtagagaggtgcgccggtgggggtgtggtgcggccgccggcggggagagaggcggcctgcgtggaggggaggaagggaaagaatgaaattagggttaaggtttatttgggttaggggttttgatagatttggagtcgatctgagccgtccatcaaaacgaacggcttagatcgctcccgcgtcggaccggcctccatcatcgggctgcatcagtgatgggctgcacgcacttcatgggccgcacttaggtcggccgacccaacaaaaacttaaattagatttccaattaaataattgttaaataatgtttgtattattaaaattagcaattaagctctgaaaattccaataaaatttcaaagagcgaaactaatcatggagaatttaataaaattaaatttaaccatatcattttatttaattatatacatacctacttaaaaataccaaatattttagtgaatttatattttaattaattgcatattcttctgctgtacgcttcccgttgcaacgcacaggtgcttttgctaaaccaaacaacacttttggtcaatatacacactccgtaatcacccggtgcaacgcacgggcacttttgctagtatatttaaaaagattaacagtatcaactatttaggaacggagggagtatatattttacattcatcgagcaaagctactcgatcaatcagccattcagccatcgtgaggtcaatcgaataatcccattaaacaatctacatgcatgtatgtactcaagattcttcataaatttcagaaggtttcgtccgtgccgtcagtcatgtccacctgttcttgccgttgcagttgctcctcgtctacgtcgtcgccggcgagcacggcggcggcctcgtacgagtcctcctccggtggcacgtgctctcctccggagccctgcgccgccgcttcttgctcttcctggcgcgtgctgccgtctgcctcgccgaacaagcggtacaacacgcgctgatgctccggtgaaagctggttgccgtcgtggaagtccgctgccgccatgtcatcttgttggtgctcctcctcgtcgtatgcgccgccgtactcgccgtccatgtaatagtagctgtcgtagtacgtgtcatccgcagcaatctgctctccggagatctcttgcgccgccggcgtgtcgtcgtcgtgcgtgtagctctgatcatctgcatctgcctcgccggagaagtgccggggaaagagctccaacaaaaccggtcgtcctcgtccggcgccaccttcttccgccgccgcagagtccgcgtcgtccttgcctgcgtactcctcggtcgccatgagtatcgactctgcgtgctcctcccgtcctccgcgacatcgtcgtcgtagcatcgccccggcgcgccgcgagcgtcgccgacgtcgacgtcgtcctcttcggaagcacggaggcgcttccggcatcgcacctcgccggggtccaagaacatgaacaacgagtgatcttgctccagatcaccgtcgagttcgcggccgtcggcctcggggttcgatccagggaaggatgcctctgcatcgccatccagaccaccgtcgaggtcggcggcggcgttcggttctgggaagtagggtggctgaggcagaggctcgccgtggagatggacgatgtggtcgtcgtcttcggcggggggatcggcgttgaggtcgcgcaaggacggcggagctggatccagtggcgaagctagagagaaataagggggtgcactacatcatcacatataaatgacaatgtacagaattttcaagcaatattatactagttaatatatttttcaatagtctcattagcatagcataagtggcgatggtacaccgacaaaggaacactgacaaaaagaacgtaccataccgagatgaataaaaccactaatatttggaaatacaccacctgtcctcaatatcttgcaacaaaggataatataaacatattaagtttccattgtaaactatagaaaaaccatgtgaaaacaaacaaattaccttttcataaatcataaattatatttgggctctgtcatgttcataaaacgatgaaccacagcttcgttggtgactttcttcatttcttctttttctatatagcaaataaggctatgactcaagtagtcatcaccgatgcgattacgcaaagaacttttcacaatcttcatagctgaaaaacacctctcaaccgtcgcagtggcaacaggcaatactagaactagcttcaaaagtcaataaactaaaggatagcaaagatgtttccttgtctctaccaacttttgtgaaagctcaccaatagtttgtatgttggagaatctatcatcttctcgcacatcagcggtgtagagacaaagatgatgcctaagatctcttaattccccagaattaaaatcattaggataaagttttgctagtctcatcaagttctcaacattaaaatcatggaatgattctcttgggctaaaggcagctgagcaaagaagcaattcagatgatgtctcattgaaacgactatcaagctcttgaagtagccaatcaataacatcattaaaacaatccacttcataatggtgttggtttgtaattcctgtcttttgcctctgtttctttggattgacatatgcttctcccatctcaagcttgatgatatcatatttgtcacaaaaagcatacacatcaccaagtaaattttcccacccatctcttctcaaatcatccaaatggcacctagttgatttgacacacttaacagcattcacaatatcttgatctttcctttgcaacgctaatgacagggtgttagtgataattaatatagttgacataagatgcaaatagaagacaaactcaaaagattggaaatacactagaagaccatttgcttgatctctatttgttctatctttgtcatctttttccacaaattctagcactttgactattgttgggaacatgtcaagcaaacttttgagagttttgtagtgagaactccaacgagtatctcctggtctttgaaggcattgctcttgatttaacccagttccagtttgaagcatcccacaacctaatgccttgcatatttgttcataatttatttctctaatcatgtctcttctcttagatgatccacccaccacattcaacaaagtagatatcatagtaaagaaattactaatgcctttatgtttttctcacaatggctacaacaactaattgaagttggtgagcaaaacagtgaacataataagctgaactactttccctcatgatcaatgattttaatccattgaactcacctcgcatattgctagcaccgtcatatccttggcctctaacttgcttcaaactgagcttaaagcctgcaaatagagaatcaatcgcagccttgagataggaagaagttgtttccttcacatgaacaacctcaataaatctctctttcacaaatccacacttatcaacatatctcaacaccactgccatttgttccttgtaggacacatctctagactcatcaactagcaaacaaaacacatcatgcccaagttcttccatgatagaatgtaatatttccttcgcaaaacactcaacaatgtccttctgaatatcagaagatgtcataagactattccctgctccatatttacccactgccttccctaaagcatgatcatgctctaatagcatatcatgaaactccaagaagttccctttgttgtaggaatccttggactcatcatagcctcggaaaggtaatccttgcttcaataaccttctagcaacactaattgaaccatttaaacgagtaaaataagcctttttagcatcttcactttgaatctgaaaagcaacattaatatgttgagatgtttgtaacaaagcatcacaatttttcattgcttgattatgtaaactaccaactccaccgacatgctctttcagcctgctttttctatgccaaccattccaaccttctgtaacaaatgctttgtatccatcctccttcttattgcagtctctaaataagaaaaaaaagaacaatatgctttgtctttggcctcactatattcaagccagccaccaaactcatcaaaccattccgggataaagcttctatttctgtctgatatctttgtagttggaaaattgagtgtacgaggttggcaaggaccattctctaggtactttcttcttaccctatctctcaggttaggatgataagcatcaatcggtttcctcaatccaggatcatatttgatctcctctttccaattgagatcatttacttctggacaggaagtccttgcattgttgctgctatcaggcacttttcttttaaggtaattctccataataaagttcacctatcattcatagcactagaaattataatatataactttaattttactccaaatcaccaaatgaccaaaccctaaccatttaaccaatataatacgaagaatcgggcaatcagccaagtaatgaagtaacctgaacatatctttcaaatataaaagtttacttacagcaaatcaaattaatcttaaagaatttgagacttgagagcacagtggaggtagaggtcttaccttgcctattgttgcgttgccctattgtgagcaggggcttgattgcttgaattaatctccagatgtagtggcatgtggccggcgaggcggcggcggcggcgacgacgacggcaacggcaacggcctcgaccaccgtcgaggtcggcggcggcttcggttctgggaagtagggtggctgaggcagaggctcgccgtggagatggacgatgtggtcgtcgtcttcggcggggggatcggcgttgaggtcacgcaaggacggcggagctggatgcctggatccatggcgcggcgcgagttgttgatcgagcacctgcgcgcaggtggatgcaggggcgagaggttggaggaggtgggacgacagaaattcaaatatataggtgcgccatatgggcttcttcctcgtgtcggagtcggagtcggagtccgtattccatggggtcattgaactatttggcatttaactatttgccacccctatctcaatgacatgtgggtctacatgtatctatgacatgtgggtccaatggcaaatcgttaattaccacatctaaaagtgacaaatagttaaatatctcgtattaatatcatggcgagttgttgatcgattgagcatgagagggtgggtggggctaacgcgcgggtgatcgcatcgcatctccgtgtcccccgggccccggctatgtgggtagattgattttgaaaataaagttgggaatatatttttttaaaaaaaactacaaataagggaaaattaattctttctaaaaatatacattattcgtataaattttacccatataaaaaatatatatgcagaatcttctgatatagctccattctgaatatataacatttgaatccgaatcagaattcaaatttaaattgggcatataaatttttagagcataaacttttggtatataaatttaggagtactcttgacaggctataccgtcgagtatggggatagttggtggtaaggtatggacgagattgtggtaaaagagacgacggaagatcgtgatttttatacacgttcaagccctctaattacaggttttctgtctataaatgtcttaccaaatccatatttttggattatatttttctaaaactagaatgcccctttcatatttatgtgccaacttattgagaaacacagttctcatgtgaaaaattcattcataaaaaactaaatagaatcatttggaaaaaaataaaaactaaaattttaaaaaaatttcaaatcatttttttgaattcatacaacattttcaccaaaattcgagaacaggtaaaaataattttagttttaaaattctcagtgaaacttttgtatgaattttatcaatttttaaaatttgttaaaatatttttttcttttcaaatttgtggtcaaataatattttcctttgattttattataactaaaaatttcacattcagatatactccaccgtttcatattatataatgttttgacttttttatagcaaacttcattgagtttaaccatatttatagaaaacataataatatatataatatcaaattaatttttatacattgaatattatttctctaaaaataatgatatgttttttataagtttgaccaaaattaaagaagtttgacttataaaaagataaacatcttacattaatataaaacggatggggtgtattcttaagtaggtagcgcataagaaattcagaataggagaagaacaatatagttattttaaaattttgtagcagtcaacaactgatggaaagaaattcaaaggcatatagccaccggacaaaactttatttttaactaggaagatagcccgcgcattcgcgcgggcatgtgcattagtttgttccgaaaatagttctaaaaaataaaaaattaaagtaatgtattttctactgttaattgattatttattatatctctttttcgtgaagaaatctcgacaaactttcattggtttgaaatatatttttttaccattctgctagccctctctttaattgcttcatatacatgcaatttttatgcatgtgaatcaataaagatagaaaatttcttttaaaaaatatttattgtattttgaatttagtgattgagggattcttaattcgactttgtattcaaatcaaattactttattctaaattgtctttttagggattttaaattgcacttaatctcgtatcgtgggggcttttaactatttgccattcttacgagtggtgcttaacgatttgccattaggcccacatgtcatagacacatgagggcccacatgtcattgacagggtatggcaaatcgttaattgccatgtcacaagagtggcaaatagttaaatttccccgtatcgtgctgtatttgatctcttcttttaatacttattttattattccaaattttagatatttataacttatacttttatagtgactcttgatattttatattctacatggaatcttgttatatttttttatagttttagtgtttttttaatttttgtttgtgtattttaatcaaattgtttgttttatatttttgttctgaatttaattacaaactccttgtggtgatccgcctgtcaccatcagcctcgcggatcattgttgacctcctcatcagtgagcctctcttgatacattagacaggacgtggcggggctcggtggcaaagatgaagctattttctagtccttgtcgaagacatggaacgtctccctctgcccctcccccccccctcctcttagtccttgcccttcatctaatcatttagtgcgttattaggtccaggaacttgtagaagtcgatgatgccgctaccgtcagtatccacctcgctaataatgtcttgtagctccgccttcatcgggttcatgcccagagtttgcattctggttccaagcttcttggtggtgattgaacttggatttagacccacacatttgaattcattcatcattttcgaagtgctattttgctcaaatatttgtagtcagaatagcagcattatctaacttctatatagtaaatatgggcaatatggatcttgaatttaattataaataatacaaaaagtcaaataaactgtgaaaagtacatgtaacttgagagtcatgatcatttagctattattatttttctatatattatgtgttaggtagaaaataggataagttatattaaaaataggatatgagaattggatcctagagatgagtaggacggtggaggtacgtacgtacatgcatgctcacatacggtaggggtggaggtgggggtaccggatttatttttgtgagatgtagcagttataattattggatctacctatttaaaggaaaatcaatggtttgatttttttatcataatttctaggaacttttaatttatttgagcactatatggtgtcttatgagtggttttagaaaaccatgtgacagtttaagaggatctgtagggagtttaatgattttttagtatataatagatagttaatatagcattttttggttctttatgtactgaactgctcactagaaaatatggataagaaagtgagcaggagagataataggagatcatttacgatggcatgatatatgttactatttagttgcgataaaggggtttatgtcaaatgatatgtttcttatatatgtacataccaaaatatggtaaacatagttcaaattaaaatcgaatatattataagatattctaattatttagttgttgtgttttttatatataaaattttgctaccataaatggaatgaagaagagaggggcggggagacatacgtactttggatgtaggtacatgttaggagatgagggacctagggagaggtgtggacgtacgtgacatttgtttttttacatatatagatctaatggtgtgtaaagagaaaataaatggtacgatgttttctttttttttctggaatttcttagatttctctaatttatcagagcgtcacgtggcggctcagaagcgtttgtaggagccacatggtggcttaagagtgtttttaaaaagtttaatggacttactcgtacgatgtctatttgtagggatttttttcataaggatagaaaaagaagaaagaaacaaagataaaaaaaaaagaagggaagatagggagcgtacaatacgcatcctgcacggaggtagggacggcaggagtttttttttccgttaaagataatctaatgatccaaaataatgagcccatctatttaagtgaaaatcgatggtcagatttctctattttattagaatgccacgcggcgactcgggagtatttttaggatgccacgtggcggtttgagagtgtttgtaggaagtttaatggtcttttagtatataatagatagataccaacgagacaaaactcaaagatatgaataaaatagatagagtgaaactcatgaacatatgaccaatatatgacaaacattcctagtctcctagccaataacttgtcaacatcttttggtactgttcaacaggcatgtttcgttttcgtgtatggagaaatctagccgcgtcgtggcaccaaagctatctatcatgcatggttattgtgccatggttgccagcatgcaattgcatagacataacttgcctttgctcctcaacctccggctcaatgcttgctttccctttcttcttacctatcctaagttcgtcagcaaatctaatcttctttcactctaagcaactgaacagcgcttttactttttctgataaatatatttaattttgataacatttaatttctcttaatctagagacggtacagtacagaaacacacaacacatatatacgtgtatataaagtacatccacgcaaaagaagaaaagcaagaaaaaaaaaccacaaaatatatacatgtgagcacgtactccattgatctcttttttagatcttttacataaacacttgaatagtatacgtacttgacatcatgcaaccaaacgtatatttatacgagtacacgtacacaggacacacggatatatactgattaagacatgtaattaatcgattaattaattcttaattcataccaagcgtccattgcccattattgcaagcttaccctgctcacggaagatgaacagatgatgatgatctaggccagctacggcgcgccgccgcccaccgtcgccgtcttcttctccttctccggcgcgtccgcgtctacggcgacgtgcccccggctgctcggcccggacggcgggatgcgccatgaccgccagtcgaggtcgtcgtcgccgtcatccccgccgccgccgccgccgccgtgctccttcctccccggccgatggcgaagcacgcggcgccacggcacctccgccgccgccgacgccatggcatgccggcgctgatcatctgctgctccttcctctgcgctcgcctgcaggaaggctaggccggcggcggccatggccgccatggccagaatgagagctaagagcttcttcgagctcatcatcgcttgcatattggagtagtatatattaatataggcaataaatatattcacactactaaactatagctagttaactatatgaaatatgatcgatcttaagtttatatttgaccctagaggttttcaaatgtggcgatagattgcattgatcgagaaatgggggcatatatatatacacacacacactgacacacaaaagaagagagcaataaaaatgcaattaggagagagagagagatgtttaattggtacgtgaaggcagagctaatatgtgtgtgtgctggtagttagaaggtaataattaaattgctggtgaatcaagggaagaagaaattaaagagagaggagtggttacacgtggttccttgctttcggtcaataaagcgatgagtttcttgcaagttggcatgtacatacatataaaacatacgcatgcatgcatatatatgacatagatcgatccggccggtcgatcgatcatttcgtctctttcgcatcgtatcttggaattatgttagcttgtttaattccttctctatgtggaggaagccacttttgatttgatactgttctctagctagcgagaaaataattggaaaaaaattggaaatagagccgatttgtgcaccgcgcaattaagaaaaaagaaatagcgaatgactctttgttgatcttcatacaattggtatcaaaagaacaagttttttttaattacacgacagacttacacgcacacacgccactacacgtgcaacaccattttcacaccctcgcgaatgcgtcccctagcacatgctctaagcgatggaaaccagcggcacatactgatctcactaaagttctgttgaaaaccaacttgcatatgcgtaatttttgtgagcaccaggatttgaaccatagtgggtagagttacgcacccacgactctaccaccacaccactggtgcttccccagaagaacaagtaatttattcgtgagagtggtagcatttatttggcaatgaacaaattaaatgtgcaaaatatccaaaagaataaatttatctttccttgccatgcacgaatcttagcgtggatagcatggccagagtgaaccttagacaacatccgacgactaaaaaattgcacgattttagcaattgaatttctgtcaaggtaacaattctgtggatttagttgttgtcccagtggtacaaaggcatatgtttgttttccccgtgtgtgtgcatggggagaaattcgaacgagaccctttttccccctaaatggaaatagtgataattcgaacaaattaaccttgcttctctgctactgtaacatgtacaatattcaacgcacgtgaagagaagtaaattagtcggtgctctttaaactcgttgtgaagattatggataccccatacccacatgacatgtatatctgactgggtataggggtactatatgtagatagaatatctttaaaggacttggattaatttcctaacttgtgtatcaaggaaatatccgagaatcttagtcggttacgattgtaatttatctttatccgtctattccgttaggaatatgggatgtatcttgtaatacggactcctccccctatataaggaggggttcggatgcctcttggggcataactttttctcccagatcatacgatcaataatacactcggcggatcaatccccggacaggagtagggtattacttctcattgagaggccctgaacctgtataaatctcttgtcttcaaacccatccatttttcctgcttgatagccatccttttttattgccgaaatcttgtttcgacactcgtcatctacatacacagcctaatgctttgctgtaaagattgcaaaggtacaacatttgaagaaattaaagtccaattaagctagacattgccttttgcctccctgtaagaacgaaaacagcttgcttacgttaaaaccggccactaattcgggctagttgtcgtttgtgcgcttgaattgtaccatgagtccatgagcacggccatcactcatcaacatttgctttatctacgaataaagcaaggttaggagttgggaatgcatgggccggtcagcaaattaatttgggttatgacattatttaggcccattttgcaccaggcccactctatccttgccaactttatgttaagctcctagggcttgatcatacgtggtttaaatcatcaccgtgctgccaaaaacccaaaagaaaagtcggagattttattattgagtgaatacgcagacagcatccgtaagtaagggggtgtttagatcacatcccaaaattttacgccctgtcatatcgaacgtttaaacacctacatgaagtattaaatataggctaaaaaataaccaattgcacagattgcgactaatttgcgagacaattcttttaagcctaattgctccatgatttggcaatgtggtgctacagtaaacatttgctaataacggattaattaggcttaataaattcatctcgcagtttactggcggattttgtaatttgttgttattagactacgtttaatatttcaaatgtgtgtccatatatctgatgtgacacggcaaaaattttcacccctagatttaaacacagcctaatatagaatcaaattagatacgtttcacgtttcagtactatgaatttgaacatatcacatgctcatatcaaaatttataatattaaaatatgtctaatctgatgttaagtaattatattttacgacggaggaagaactagtagctaaataaaaagagagataacggtgtgtttagtttagaaatttagttcgaaagtttaaatttcttatttaaaaaaaaacacttgtaccaatgaatactgatgagtattttttttttctttttacaaaatgttactatagattagaatgtgtgacccgtgataatcccatgttcgattagctgaaaaagtagaacccaatctagcactctctctattttaggttagaagacgttttaattttagctaaagtcaaactgtttttttaagtttgaccaagcttttgaacaaaataataacatttttaatccaagttaaatttactatgaatatattcaattattgatttgatgaaactaattaaatattataagtgatactatgtttgtttatagatttagttaaacttaaaacaaatcaaaaactcatcctgacgcatctctgaacacaagatgacgcattgtgccaaaagacacgctcgtgtagcagcgcagcatcgatcagcagcgtccagtgccatcactgcctgctaccacctgctgcctgcatttaatcaccgaccttacaccagcagcagtccaccaccccgccgcttccccgcaaaaacaaaaaaaaaaagaaaaggagagaaaaaaactcctttccgccaccctccccttcccctctctctctctctctctctctcacgcagccgaatcgcgaggagagattccatttccccaccatggcctccctcctcctcctcctcctcctcgtgctctccctcgccgccgtccacaccgacgcggccgcgttcccgtcgccggcaggtgcccgcccaacccagccaccttcttctcccgccgcgccgcggtttgtttgggggtggcggcggcgtgcaatgggcggggatatattcgatcctgacattgtttttgtgggggggattttctgcagatagcatcgtgaggcagctgtcgtcggtggtgaaatggccgcgggttccttcgtcgtcgtcgtcgtcgtcgcacgggcacaagcagccctcgcacccgcagtacggtgagcgccatagctgccgacttggtttgctagttgctactgttccagggtttatttactagtagtagtagtcagcagcgcaagttcgattagttggcggagtggtgatttgacgatttattaggttatttttgcttgtttctggctttctgcagttcggacgacttaccttgtgattactgattagcaagtgtgttagtatcagtatgttgggtggtgtctcttgtgaggaagtgagtttaaccagagtattcttaagatgaccaagctcaccaaacatacccagtgttttgtattatattgtctatgcttgcatttttgtttacttgagttcaaatgccactctgtgcgtgtgacctaagcaaaacaatgtttactgcctatgttcaatttcatgcatcctcacatcactaaagtgaacttaggggcttccagatctagcagagtgcatcattttatttagtgaatgtgtttgtggacagcacgtgttttttcattatcattattttgtgtccttgtatgctgatggtgtttctctgatgcggcagatgggggtgtggctctgcagtttgagagcggctactttgtggagacgctcgtggaaggggacaagcttggcgtcacgccacacaccattagggtgtcccctgttgagggtggagagctccttgcagtggactcggcacatagcaacattgtgcgaataactccgccactgtccgagtgtatgttttcttcttgccatcctcagctcagcgcttccttggttattttaaatatgaatgtaatatatgacatggaacattttttggtgtgtcatccagcggactgtttttaggagtgatcagagtttgttccttctttccccaaaggcatgaaactttaaaattagctttgttaaacatatcagtggctaataagcatatatgcaaatatttttttttcattttcttcttatgtagctctaatgaatttatataccaatttttaaataattgatatttccatgaaaataatgtcatctatttcgaagatttaggaataccttctttttactgaatttaggaatccatgcataaaatcggttttcaggtagtgagagatggagagagaacttcacatttgtttgtgctcaggggaatatcatctagtactagtagtgtagatactagatactgggactgatattacaacctctgcagatagcagaggaagactggttgctggttctttccaggggcattctggccatatagatggcaaaccaagtgatgcacgattcaaacgccccacaggcgttgccgtggatgatacaggaaatgtctatgttgctgatacagcaaacttagcaattcggaagattggggaatcaggtgtgctacaatttaatgttacatctgttctcaaagcagctgtgacttttgacctaatacaaactcttacctctgtttgcaatatatatgtaaatacctacatgtacagtattattattgtactttgtatgcaaatatgaaagttcattttcattttacctaattaattatttaaatttattattggtcgatgtttgaactgtgaaagccaaatgtgacagctatttagaaacagaaggatgacatatgtattttatgcattatttctgtgttagtactaggcgaatgaagtgaatgaactttctgtgcaggagtgaccaccattgctggtggaaaatcaaacatcccaggttatagggatggtccaagtgaagatgcaaagttctctactgattttgatgtggtatatgtgaagaaaatgtgctctttgctggttattgaccgtggaaatgctgcacttaggaaaattgcccttccgcaagaagattgtacctaccaggatgcaactcttctatcgtcaggtccattctcctatttttactttttatgtttgtaatctttacatctagatgtttttgcttgttgtcctatccgtcatgttctttagaacattaagaaaatgttgtttatgttagagagagagagaggagttagctggctgaatatttgaggcagttttgaacaagaaaagggtttccgggccttattttaagttttgtgctaattctgtttggtggtgctatccttgaatttttatggatgattaattgatcaccacacagttttcttctttacatcaagtgtggctcactcgaccgctttggtcccaatacatgcgttctgatttttttattattattttaaagttgtgatgtgaaatgatatctgaattggaagttggtaaaattgctagatgttttttacttcatgtatccctgtatttataattctatggtagcatactgatttgtcaagttgaaccagaagtaatattattagtgccatatcagtaatgtagatctagcacgcgccataagaaaacatagtctgtagcagatcttttgaacatacggatcgctataaatgaatttgttgattgaatacaagtgtagtatagaccatgactttctcaaccatttataacgagatatgccatcctggaactggcataatagtatcaaataaattgtggatgggcatgctatggccagtgatttgcagctttcttagtgagccatctgtaattttatatcatattttgggcctcttcctctatttagacttttggagtttgcatgataaatcttgtttagaaagctgagttacttgagtaaatgactagttttttttcataatccctaagagactctttttttctagaggtaataatgcagttggtgttgtgtttgtgtttctggctgaatcatttatatttctacactaacttatcttaaattatgactgtatgacaccagagctgtagggatttacaattattttcatgttcatttacctgttgaacatgttagtttttatcattagttcacttcttgctgcagtttatgtaccatttttcaaaagaaaaagaacatgtctagacttgatcactgattttgtttattttcacagatatcatattggtcattggtgctgttgttgccggatatattttctctgttgtgcaacatggatttgggtcatcaactgctgaaaaggtagtgttttctgtttgttacattttgggattcggttgtctttttatatgctggattttggctttcagttggtccttttcacttgcattttgcagtatcagtattcttgaagctttgttatgaagaattcttagtcactttaaactattatcaggttcttgctttcagttacaatggactgaagcagagaatccccagtatttgtttcatgaatttgaacccactatttacatagtagtttgtgtggatgccattgcagatcgaagcacctgaagatgagcatcaggagagcagcaccgtgggaaagccacctttggttgtggagagcctgaaagaggagccaagtgctgggtggccttctcttgggactcttattggtgatctactgaaacttgttattgaaggggtggggaatcagcttctcaggctcgtcccatcacgcctgcaacatgggaagagaaaaacagacctcactccactcaaagacaggcttgtgatgcctgaagacacagaggagaccccagtagcccagaagttaagtagcactccaatgagacccgagacactccatggtcctaacccagtaaacgaaacagcaccgaaggcccagaagagtgtcaaatcatccaaatttagggattctacgctgtcaagcaagcacaggtcctccaagaggcaggaatacgcggagttctacggttcatccgaaacacctcaagtgagctcaaaggtcccaaaagatcggctacgccaccgccaccgggagaagagtggggaagctgtttatgggactagtcatccggagcccaagcctgcggaagtgaagcccgcagactacagtgacccaaagtatgatccctacaacatcagaagcaaatatggtgctgacagcggctacaggtactgatgccccgttcctgccatcgttcggcatctatctacccccagtgtactgatatcaacttccattagtcgttgtgcaaaagcacaaagctgctgccggtgcttatgggtcattttctcaccagttgtaaccacccataagatgagatgcggcagatggtcattctagttaggtggtgatcctatatcaatttggcatccggaatccctctatgcggttcaggggaaagccaaaatgtaatttcgcgcagaaagcaacccgtagcctggtagtaattttgatctgctcaatacctttcatgttgcatgcttgagctctggtcttgccatgttatgttacagcctgtggtgcatgggccatctgtcatgacaggcaagtccaatgtcaaaccagctgaaatgcagctcctatcctagttctccttgagctgtcaatgaaagtgaggtctcattcttctctctttacactgctggtcctaccctgcaaaaccaagatgctgactggacagtcctggaaggatttgcatctgtgtgcgtgttgtcaattctgaattattcagattttctgactccatgggcggcctaacttttgatgatatgtgatcctgccatgtgagggagaatacgaggcgtctccgcgtgacaaagtgtggtttcttttgaaggattctgacgtgtgagcagcagcaacagcagtcaacaggaagctggggtccaaacaaaaacaaaagctggccgtttttcggcgacatggccaatgcatcatctattagcagctaatctgaacaaactttcttcctgtaataatctaatcgttggagatataatcaaagagaagaaggaaaagataattgtatgggcctgaattgtatgtagctgtctgccactcttgggaagctagcagccgaagcggtggtggtcctggccatgaactggactgcatatgtaggactactactacgactgaacaagatctggatagattaagtgataacatggcagcaatccacattgttgggcggcacgtcttgtggtctccggcgcctctttttcggaagaaaattgaggagggaactgccattttgctttgcctgaaaggtgcaaaggcactcgcatgatgagatgagaaaataccttgggatttggggactcactcaccgtcctactactgtactgttgtctgttgacttcatcttcggagctcatggttgtgacccccccccccccccggggtcacatgtgaaatccaataatttaacaacctgatggatggacatttggatggatattgctcatcctttatctcagactatgacctgttcgttttcggttttgaacaaaatgtccaaatttagctatagtcgtttttgtagttgtgtgtgcgtgtgtccaacaggcggctaagctaattacttgactaacattactcgtctccggttttgaacaagttgagaaaaccgttgatgaacatccctatccaaaaccacagccgccttttcttctcgacacaacgggcaagtatttgtttttttttcctcctgctcgtaagagcatcactgacagtaccaattgagttttagactaggtaagccatagacttatctgtatatgactttgctttattcttgctctgaattttgttttatttctccataagttttaggatatcacaagaaataaaacaaagtaaaatttctaagaggctaggactctttcttattcccccccccccccccccacataaaattgagccagaggaatgtaatccatagttattttctttctttcctataaaccaaagggatttaggggggaaatgtcaaaataaaattgaatcgttctgaagttctttgccgatccttcgtacaaagggaacctaaggtcagcaacatagctagatctaagacaggatgtgtcatatcctaaaactactaatctagaaggtgcacatatattgggatggagggagtacatattaagcttcctctgaatgcagtaattttacaacatttccatgtaattagtttaacttcccagaaaatcatccgaacttatcaacttcaaataaatgacaaatgcatgtgacatgcatagtagcatggaaacttatcgtatgcacacttacttcggatacattacatcatgcacaataactaacaaatattacgatttcttttttggaaaatttacatgtactttcaatattatgatgttaaaatttattattatttagcctaaaagaataaaaaatgtcagttttaatagtatataaatatgctagaatttttctctcactccctctatgtatgatggatttaacaatgagtctttagagtagtatgcaatattattggaagttcatatacaaattcttttagaatatttgtgacaagttctcttgagccacttcatcggatcattgttgcggattatttgttctacgtatcttgaaaatatgttttttatcttgaaaatatgatttttcataaaaaaatacttctactgcattgctcatatcccttttctaagatatttgttaagtttattaacaaaatatttaatttacatctgtaatcatatggataattcagtacaatagtcttcgcaatttttctccaagagtacattaccaattattagctaggtttattcagaccaacgaaattaaatcatgtttatatgatagaggagcagattcgggatatcccacaattatcaaagcttgaaattatgtgttttaaactgaccctaccaggttatcagctggactctagaatctactgtgagctctctggtcttgggtgcttttattaggtcaataagtggttggtggtaactggtaattaagcttctaattaagcatgtgccagccatacctggatgcaccccaggattggggttagaccagactgggaaaggaaaacaatagcagaaatcagtctgatggtttcacaccacacatgatacatactccctccgtcccataaaaaactaattaatatgacatatcttagttatatgaatctggacatatctctatccagatttattgtactagaatatattacattcagttttagatttgtttttttgaatggaaagagtagacatactcctatatatcatcgtgtaacaaaacgatcagcaacaagttgcgtgtagaaatacggtagaatttagtggaagacgaagaagaatccagagaaagaattaacgactgctgttttggatccatcgaccgcatgcagctcactggagaacaaaattatggaattttatcgttgataaagtgtaagaactgttaaacattagagatcgcaggtaagaatgacctacacgtaggatatatggatctgaaacccactatttaattatgtttctgacgtaaaactcttcctattgtatttctacagtttttctatttttattctaaattctaatgattattgtgcatagaaatattttaataactgcttttttagtttggtcaatttggccttgcgcaatgatttatttataagtatcagttggctccatatttgatcgtcaggaggaccaatgtactgtggttattgaagcagcacacttacagttgatcatcatgagcttcttcatccattttgaacggtgaactattaataagctacgtgcttagcttgcgttttcatttttgcgcttaatctattttatacggaatttttgccacgctgttttttttctcatttatttggttacaggaactttggttgggtagccttgatgcagaggttgaggatggagtaattcatcttccttgcaaaattgaaaccgtttttttttctaaaaatagttttaattagctaggtttttttttctgtggtaagtaaattggttccccatggagtgtcgttttttgttagtttttttcttggttggtcaggatctataaattagctttgcagaatcgttcttgggtctttgacagatcatcgtccttggaattcgtgcaagcagcagctaaaatttctgttgacgatggcgaagtcagttccgtcgtagtttacaataattaattagacttcctgatgttgctttgatcacctaattaattattctagctctttctgatgggtaagttacatcttctcatagatatcaagttcttgtcatccactgttaaattttctgcgtgctctcctattctaatacagcagagtcgtaattcaatcaacacaatcaagtttgttagccctgcaacaaatcaaccgttgccaaaatttaaaatttgaacttaattttttaattgcagtgtattttcaacgtggtttttttatattggcttttcatacacatattattaagctgtttgggccaggctataaacaaacagaaaaaaatgtgtgtttagcaatttgcaaatactcgcgaatggatcataacttatctggaagtgtggagtcttaaagaacaaaaacacccaactttttagtattatttgttcatcgacatcagccaatcagtgtggctgctgatcgatgcagatgaaaactagccctctctacctcaactcacatcagtaatcagatcattggattcaagaaaccaaaccctcttatctgcagcctgcataattgaccatgaacagttcaaatcatagcgtcaaatcacacatcatttaattcaggtcgcctttgaacattacaaccacatacaaacgcaccacaccagttaatccctcaactgtacgtactcccccgtcttaaaagaaaaaaaaacacattctaatactacgaatttagacataaatcatagtattagaatgtatcatatttagtattatattggatttttaagaaacggggagtatgtcacctcgatcgacctgcaaaatctcgttcgaaaaattcaaccgctagctatgaatgtttggcaataatcactccggaaagcaattagtaattgaacacgtttgacaacggcaacaacgcaagttgattcagatgacaaaaactttctgcgtgctatatattgaaatgttttattaagccacgtaactaattaagtactggtagtatatatattctgaaatgtaatccgacgttttgtcaaagaaaatgacggcaggacacgtgtggacacgaattaagccaagaaattcagttaattctcatataattcgtacaaattttccgtattccaaacaggggcttagaataatagatggacagactcgtaaattacagtaagacattaatggtcgagtgagttgtgttttaaaaaaaatattggtgtaaattaggcaaagctgagggtaagagttaaagagaaagtttaatagtagagttaagtattatctataaacttataccatagttaacatgtactccctccgtcctaaattataacgcctatattttttctacacagtcttcaatgacatactttgaccattaatatattagtacatgttatatttccaacaaatatgaaattaacatcatatgaaatactttaaaacacaaatctagtgatataacatgtataatacttagcatatatatggttactatgattattagtcaaaagttatcgagtttgattttccttaaaaagagggtgccttatactccctccattccatattgatcaagaaagacttaactactactccgttctagaatataaagattttaagggttagacactggtattaaaaaagtaagcagaattaaaagtgagaaggttgtgattggttgagaagagaatgtaggtgagaaaatcgaatggtggattggttgagaagagaatgctgatgaagaagttgttatattttaggacaaaatttgaaggctaaaagttattatattttggaatgaagggagtatgtgttttatttaatgtgaatatgtgatggagaataaatcaagaagcatgtagacttaaactccctatatgcaaaagaaacaagcgcttagaccatccccaacccagaaactataaagtagtttccatatttgccatgtcatatagatactatgggtagaaactatgtatccaatggatggtgtcttcaaattaaattctcatccaatcacctctattctctctccttttatccacctatcaccttgttttcattcttagttcttgtgtagatatggtttcttgcatgagaaataatttcttcatctttttacctctctcctcattaactctcttgccacataggatttttgcttatgtggcaatgtatttaatgctatgaacactagatggcatggagggctggggatagccttaactaccctaaatgcatagatacaataatgcttcacgttaaacgaagggacaagagttatatgatgatcaatttgaaatttgtagtttttggttatatgatgatcaatatggaatgagagagtaggttagttataatgttctttatttttttctcctctctctcatttatctatttaatacatttatcttgtatcatttgtaaatgtggctcttgcataagagccaacactcctcatttttcttatatcactgttctccacataagcttatagttttaccccattattccatctaaacttatagttggcttatacctcgttattacctttgctctaatatgaaccatggctcaacatccgatggtgctgttttttttttgcaaatggtttttcgaaaactatatatagtgggaaaacataaaaatggaatccaagtacaacttcttttacatattgttgcttttttgggggatgggaggggggaggggggatgtgttcatattacaggagacattgatttacattcgtcgacaagtaagatcttgactatggtatttgaggatgtagggcatggatggtataagtatatatgcattgatacagtaatgagatacatacatggaattatatataggtttggacctccaatatgggtggtaggcctaattgtgttgtctgtattgattgaaagtatcacaacaaagtatagtacatgaggtggatccataatctggtctacacaagtaatctcggcgaaaatgtgaaggcagtgtagttggcgttagttatggctccttctgaaagttgaactagtgtgcagattgtggcttgcaaatgtccatggcttgagataagatttgatgtccttccctcctaggaaaccttgtatttgtatcaaatcttgcccctaagaggccctgtacttatatcagagtatgacctctcttctaagtaaaactcggcatccaataaggtaccggcagagtatgtattccttatcattcccgattccgactacatgtcccttcttaatagaagggattgctttattgtcctatctaaatatacatgtttgaagatatctttccatatatgattggctatgcatattcctagctaggtaagtacatatgtatagggtatcacatatatactaaattgatagtagtcttgaacctaatttaaaatgtaaaccacacaaagtcaagttatcaacacatataacctaagcaaatttttgtttaactaggaagaggttgatcaccttaatcctttcatccgggtggtgtatatgcatgattagattataaaatttggatagatttcaaatcactcaaccgtcaaactatgcatagtaaaatttatctggaatgtcacccactttccttgaaatacgaaccgctctagactgtaaaacaagatctacttggcatccaactcatttttagaaatgtctcattgttccttttctctgcccaaaaagatatccttgcacgccatgttcttcagcgtctaccataagtttgtcgcccttcttagagccaacaccttgggccacaaagtaggtggtaggaagccaaatcttgaacttgacatgttgttgttctttattcgttcatcttatgtggattcatgcctcctctttttgagatcttggctcaaaatatgtcaaggaaatgtttggtttggagacttatcaaactttggttattcttcaaagaatgaagattatttggtagggtagtgatggttggcacatgttttgtttgttgccttatcaaaattttgcatcaaaatttggtaatatgattttggcaataaatcaaataggccttaaattatacttatttatgttcacataattttcttagttgttggactataatgaaaaaaataataatatcaacaatttaaatgcttcaagggagttgaatgggggcacatgccctcttcacctaaaaatatatgaaatatttgaaatatttaatatgcactaagttgttgctatgtaatattttaaattaaattaactaacttttggtgtgtgtgctctttgagttcagattttcgatccacctatacccaccttgtatagtcactttggtaaaagaaattatgttctttcatttgtaaaagaaatgtcataattttataaagaattttgttatttgttagttgcttgattttatattatttgtaagtccactaagcttacacaatatatatactcacgtgggaacatgtcgatatgatgcaaagcatcgggagttggcgctttgattatcattaattagaccgttaccattgctacttggagggatattatgatatcagactaccttgcatgccttaaaaagatatcaattttatcatgactacagaatagctagttttgtcgactcatatttggagatgcggctgccaggttctagaactacttaccattttgcacacccctttttctcaagtaacaaagcattatcaaggaaggtagaatccaaaagattaaactctcataattttacaatgtgatataggtgatccaggccttagtgacaaggtctgttgacacataccttgaccgcccatcgagggtacatactaagccactatggtacctcacatgaaatgactcaattggtttggatacgttgtattacatcgaatacaccgaccatggagtcgggctaatatgagcggccgagtgaaatgtctagctaccatgggataatctacaactagctggaaagtttaccgtcgatggcaatatctagctcccaatgtctattcgtcgctagttagtaatactagtcattaacctgtattgcacttgcagggcatgtagcaataaactttagatttctctcctgtctcgagtgcaagctaaggaaaataatgttggaactagggcgcgataaatttttatcctttattaaataacagatgatggtacgagttgtgagagcatgtatactcggtttatcatcaaatcatacccctaaggatcgcattagcatagggcaaatgagttgcttgtttgagccctaggcaactttaaatactagaatttatttaagagtttttttatttttatttttatctttttcaatcttgtcttctagattgctagaagcacaagtactaaaatttcagtccaaaactattttttgttattttggtcacgtattttgaaacagtctaaaccatatcgagaaaatgttgtccaaacatacgtgtgctctatattgcgcatgcagggtactaccgatttatactagagatttttaaggaagtagataacatacaatagtaatactcagtcattactcctttcagtgatccggtactcctacgatacaagagagctttcgagtgaatgtgcacatgacttagaccttattcgattaatccctctctagagaattgagcggtatttggagctccccactttctatttttacatgaatctcttctctagtcctctctaatcctttttcataggaattaatcgaacaaactcttatagcaagtttaatactaggctataagccaactataaacttatgtaaaggtgagagaaaattagaaaaataaagaatgttagctctcataagagcaagtttaatagtatagcccactactggctccaaatcatttatagtcaattcatacaatagttacctataaatatataccacactattaatatctggtcccacctgtcatacacacattacatattggagtccgtgctgcagctggctacaaatctgtagcccgttactcttctctctcctcttttatctcctcaaaatttgtttatagctggcttgtagtctgctattgtatccactctaagagatagctctttacatactccaaagtaaatacgttaaatgcatatgtgagagaagagaagaaaattatagacaaccttataactaatactatattatacatgttagctctaatataaatttatagctactagcaaaatgctcaagcttcgctttgggtagaagaagaaaaatatataatatgtcatataaaaaatatattttgtatcaaatatcttatcattatatggtatttacttgtttgaatcaaacgttgggctatttcataatattagaaaatattataaagtaatttacaaaaactacaaaaacaataatgaagtgacagatttactgtcaccataactactccctctgtaaaaaaccaacctcgtattaggatgtgacaatgaatctagacttcgagaatatccaaattcgttgtactatgttatgtcatatcctaattaaacgaatctcatactaggattttttttagggagtagaagtttttaaaaagatataggtcttgtttagataaaaaaaattggcaaaaaatgtcacatcaaatgtttggacacatgcatggggcattaaatgtgggaaaaaaaccaattgcacaatttgcatgtaaattgcgagacgaatcttttaagcataattatgcaatgatttgacaatgtgatgctacagtaaatatttgctaatgatggattaattagggttaataaattcgtctcgcggtttataggcagaatttgtaatttattttgttattagtctgtttaataattcaaatgtgcattcgtatactttaaaaactctacacccaaataagtaaacacacccatagataataggcaaaatttgccacaggacacacaaaaaacgtgtaattggctgggagacaccgcaaacgagcaggcggccgctccgcgcagcagcgcgctagcagggactggacgcggaggcaagcaggcaacagccacgacgggagcacgtgacaaggagccgcctacggtggagcttcgagcagtcgctagatcatgctcctccacctctcgtccctccccaaccatgtcagcctccgcgccagctacctcgccggcagctacaaaacttctgtgatttcgggtgggggaagatgacgtcaagggcaatctcgtcattttaaaaacaatttcacctctttttgactcggaaataataaaataatgcgaccggtgtcctatagccaattatatattttttgtagtgtccattagccgtgtcacgtttttgtgatatcttccaaccaattacatatttttttagtgtcctgtatcaatttttgcctagataataaactctatctcttgcaaaatactcctacctccgtatctctacgagtttccactactgtgcatgccttggtatggtatcctattcctacccgcaggtaggtcgttttccacgtctgctgctgcctgcctcctgcccttgttgccagtctgctgcggtggcacagagaccgttgcgctgcacaagcgttgaccttggattttcatggcaggcatacgtcccaaccatagcacacctccccataccaatcaatactatactggacgtactagtacatcaatactacttctacagtagagtactttttgaacgccaattgccaagacctagcaacactggagtattcttaaaagtggatcactgatttggctaattcatgatttatataaaaagatggacttaattaacacagagtaccgtttaaacttgtaactttaggtaagctctccccacattttttttacatgaagctcttcccacttgaccttagagaagtggagtactatccccgtttcaaaatataataacttttggctataaatctgcacacacagttatctagattcatagctaaaaatgcttacattttaggatggagatagtaactagcagagaagagagaaaaaaagaaattagtcgatcaagctaactttacaagtgcttcaagatattatttttagataatgaagtgattcaagatatatgtattaattaaatacataagtgaaaaaaaaggaagaggagaaaaatttgaagataaacttatagccaattaggtttgaaactaataaagatgaagattaagttgatgcacgtaaaatgagaaagccattagcacataattaagttttaattattataaatttgacaatggatatatttaatattttaaatcaatttctatatagaaagttttagcatgaaacacattatttagtagtttagaaaacatgctaacggaaactaagataaaatcttaacatgtacttataattatacatgttagtcctaatattatggttagatggatttacatacagcagtagtagtagttaactctactgttatatcttgctactacctccgtcccaaaatatagtaacttttggttagtgtctagatttatagctaaaaatgcttatattttgggacggagggagtatttctttatttctaattacgatgcagattttaccttagtttttattagcatgtttttcaaattgctaaacggtacgtttgttttaaaattgtttctatatagaagtcacttaaaaatatcaaataaatttaatttttaagtttataataattaaaaatcaattaatcataaactaataattttctcgttttgccaacgctcactttatcttcatccatctcaaaaccacgttagagcgagacaggaaaaaaaaagaaaaaaaaaacaaaatgtctgaaccttgataaggtcggacagctctgtctgcagggtgggcccagcccaccagtgtcacacccctcccgaaagcaaagtttacccccccaccagtacgcgtagcgtttccccacactccgcggcgccgcaagccaacaaaaaccaaaaccaaaaccaaaaaaaaaaaaaaaacctggcaaaaccgcggatcccaacgcaacgagagatagagaaaggcgaagacgaaaccgaagcagcgaagccaaggttgacatgtcacccgctcctcctcctcccctcttccccttcctcctctagaacacgccgccctctcctcctcctcctcttcctcctccacccctcgccgcgcagggcaccgaccgtctccgcgccaccgctcgtctcggtctcacctccacctgacctgacctcacccaacgcccccctcacctaatccctccctcctccaatcgccctcgtcaaaggggtgcaagaatccaaggggggagtggttggggttgattggttcttggttgtggtggggcatggcggcggcggcgtcggcgtcgtcgccggtggagttcctgctgcggcggccggcgccgcggcggcggcggctgccgctggcgggggcgttcttcgcgcccacggggctcgcgggggccacgctgctccgggcggtggcgtcgctcgccgcctcgctggtcgcgggggccaggccgccgtcgcagcggcggaacgtcgacgcgctcgcccgccgcctcgcgctgctgtccgcgatcctcgagtccatcctcctcgacaccgcggcggcgggcgccttctccgacgcggccaacctctgcttccgggagctctacgtcgtgctcttccgcgccgagctgctcgtctcctacgtcgcctccgccggccgcgcgtgggcgctgctacggagcccgcacctcgccgcctccttccgcgacctcgacgccgagctcgccgtcgtcctcgacgtcctcccggcggcatcactccgcctctcgcacgacgccaccggcctgctcgacctcctccgcgcccactgccgctgccgcgcgcccgcgcaataccatgaccccgacgaggcggcgctccgggaacgcctcatggatgcgctccgccagttcgacctcggccagccacctgaccacccctcgctccaatcgctcctcgccgacatgggcatctccaccgcggcttcttgccgcgcagaaatcgattacctggaggagcaaatcttgagccaagaagaggacaccgacctgccgctcgtcggcagcgtcctcgccttgctccgctactgcctattcgccgtgttcgaccctagcaacgcgaaggcgctccgggattggccgttgtcgggcaacaggcagcggcttctctcgattggcggcggcgatgacacctccttctcggtgccaaaggagttctcatgcccaatttctctggatttgatgcgtgatcccgtggtggcgtccaccgggcagacgtatgaccggccgtcgatcatacagtggatcgaggagggccattccacctgccccaactccggccaaacccttgcagatcaccggcttgtgccgaaccgtgctctccgcagcttgatttcacagtggtgtggggtgtatggcttgcagtatgattcgcccgagagcaacgaggggatggcggaatgtgttgctgcatcttgcagtagtcgggctgcaatggaggcaaacaaggccacagctaggattttggtcaggatgctggaggacgggtcagaaaatgtaaaggcagtcgctgctaaggaaattcggttgctggcaaagaccgggaagcaaaaccgggctttcatcgccgacttgggtgcgattccgctgctttgcaggttgctcttgtcgaatgattggatggcacaagagaatgcagtgacagcgctgctcaatttgtcaatcttcgagccaaacaagggacggattatggaacaggaaggctgcttgcggcttatcgtcggtgttctacagaatggatggactacggaagcgaaggagaatgctgcggccactctgtttagtctatcagtggtccataatttcaaaaaactgatcatgaatgagcctggggctgttgaggagctggctagtatgctgaccaaggggacatcaagggggaagaaagatgcggtgatggcactcttcaacctctcaacacatccagaaagctcagctcggatgctcgagtcatgcgcagttgtagctttaattcagtcgctgaggaatgacaccgtgtcggaggaagctgctggtgctttggccctgctgatgaagcaaccatccatcgtgcatcttgttgggagctctgaaactgtgatcactagccttgttgggttaatgcggcggggaactccaaaaggtaaggaaaatgcagtctcagctttatatgagatttgtcgtcggggcggctctgctttggtgcagagagtagcaaagattccagggttgaacacagtaatacagaccatcaccctcaacggaacaaagcgcgccaagaagaaagcaagcctgattgtcaagatgtgccagagaagccaaatgccatcagcaatggcactagggagcacattgacagtcgttgatcgttcattggtagggaacaacacattaaggcgtgctgcgagctttggcagtggagaattgtcaaacccgatttcgatatcagtgcaggtgccctaggtgaaaggtttctaccctggattatatggatggttacatttggtgagttttgtccccaaaattctttcatttcatgctccaatgaaggtatacaaaatttaatccaaaggatttaatactcgaaatatatcagatgttcctatgtttgtgtgtgaaatgtggataactgtgcagacatatagatgtgcaattagagttccagcttgatgttcctccttggcaagctcggaaattgtccaatttttgttttatttttttataaaaaagcaccaaatatgtatgctgtatgctgtaaactgtttaaattaattagaagctttacactgaggcaacagtggaaagaaatggtatttcatttcaccaatgggattgcaatacaacatagactttcacatttactctacaaaagccagcttaaaattaattaagtatgtagtatatcttaaaaagtaactctagctattctagcataggaaatgaacaaaaaaaattgcactatcaacacagacccccccaatctgaactcttccagcatggaaattgttgggagagaatgagtggtgtagaaactgtgctactttaggacaatctctactttgttgaggagaagattgaaaggacaaagttgatcatgcaactgaagaggagggggaccatcaatccactgaaggccagaaaacactaccggtgagtaaagatgatgttctggaatacaacagctcaatggaaacagggtgcgccggcggcagtaacctgattggtatcagaaagttttatttcacaatggaacccagtttccactcaccgaggcaccgagctggtgtgttcttcgggagaagtcgtgtggaatatcacgctcctgatggaaatttccctgcttccatttgaacaaggagcacaagcctgcaacaaccataataaaaggtggatcaagtcaggatacctggactgatgaccttttgagaagaataaatcttaattggtgacttttgcagttgcatgacagttcttggcaaagttgccaaaccttcaaaattattactatatgtttatcacatatggtacagtaggatacgaacaaattatgtgtgaatcttttttagttaggttggctacaatctgaacgaagacaacaatcgaagtttgctaggtgtaggtggtgcagagaatctttctgttatatgggagtatggaactgactcctgtaccttctcaatcatctgaatttctttatcgtccgaattttcctaccatcatcagcccatcagtcttcatcacctctcttgacattttgtgcctgaaatatcttccctcatctgatgtctacctaacaaggttcctgtacaaattcacaccatgatcacgttttcgtacttaattatcctcaccgtttcgtcagcttccagggtcggtagccatgtatttcaaacgaaaacgtgtgtccagttctcgacttttcggcttgacgaagaagaccgtcgcccaaaatctgcacattttcacacttgggccattttcattttacatgccggtttttaccgtgatcagaaacttttcagaattcatacttaacagtaacagattaggcgaatttcggaagagttttggcgtaccttgcgtgcgaattggatcggaaatcatgtggatgatatgctggtctccaaggcctgtggctgatcgtttcagttgggctatgagctggacctgtgattctcatgaccgtgaggttgatgtgctgaagcagctcgatctggcaaccggagatacggtatcaggatggttctcggcgccggatttgtggttgccttgagctcaggtcggggtcgctaacatggatgtctcggcaaccaatcaaatcaaattcatctgtagaaaaatgagaggaaaaccacacatatcaatggcgtgagtagcgacttcagttgagtcgaaagatcaaactgggacatttcagtggttaccgctggccaacatgcttggaacgcagaaatttttatttactcatgtgagaattgaaatgtcttaaaccctgtaaaattatgcattgaaaatgggccttgaatggatcagaaacatagtaaacaaacccaacggaaaataaagataacgtctgtgcggatacaaaagggttaaaaaattgaaaagaaaaaaaaaagaaaagctgatactgcaatcaggcaaaactgaacgcagatgctgtctatacgttcatggatgcgtgaataaaaacacgtcagttaaaactctaatcggattgagatccggtgcagttataaactctaaccagcatcataggactgttatgtattttcagccgtttattttaatgatcaacagttcagattcactgctatagtactcgaacaacagtaaaataagcaatgttttatattacaacacttttgccacagtatcaaattaatctgtaccgtttaagtttgatccaacttagcagctacaactgctaaagttgcagtcaataatataattgcagctgattcggatcaaactccaatcagtcagtgtgtgcttcacattctgtaccaacaagtaacattaactatgatctgacgggacgctttggaagacgattaaaaagattaggcagaatactgtcaattacctgggtaacatcagatgcgtgtttactctttaccttcatacgcaaaagctgtggtactccctgccgaagtcttcatcaagtcataatgccacggctgatcttgattgtacgatttagaaagagtcgtgatgctagccaaccaaaactgcagcaacagacttgtatttttcagttgttcacgtcagagagtacacatgaaaaaaatcgtatcccagtcgaactaagcaagccagtcattacgagtatgagcttccaggtcaaagatgtacgaacaaggcttcttttttccatcaaacacgaaaataaaactcgaaaagtttcactaagtttccataaaataaattctagagtgaaaatcagagaaagaaaggaatgacggtcgaatagcattgcttctagtaagtagtcaccgacccagtttcttgttgaaatatacaagtacaaaatgtaagatttgcaaacaccagcatcgagattatcaaatatgtcaacgggaagaacgaccgtgcgtgcaaaattcatcaggttgctgatgtcggtgaagaagttgaacctgcacggttgcatgagtgcgctgcatgactacaattggctgctaataactagtgctctacatgactaccttccaacaatttgtttaagtctatactaacaaaccaaaggcccactgattcctgacccagtttgtgcagtaagtagtcagctgatcaaacggcaccttggtttgcagaaattacctgggttaatacactcctatcattttagcaaaaggaggcatgagaagctatatgattgactgcttcatgtagcacagaactacattgaaaggtggcagtggatatcaagtatcaacagccgtcagcagattgtttctcctgtgcaaattatattagcataatgggacttgagcaccactaactctccactcatccaattgtccaattgtttaacctgatacacgagcacctgccattgtacgatgttgcctcccaaaacaagctccatactcctagcctctcatctgaggctctgaaacctttcgtctcaaacaaaagatcacataatctgtccccatctcccatccaagaagaactcacataccaaccatgccttgggctgaaagcttgctgttcctcctcctcttgttctcgctgcccattcccttctcccattcttggtcctttgattatcccagccccattgccaacattaattctctttggacgaacaacaatgccaccatcccatacagtgcaacctacccagatggttcaacgatcagagcgattcttgttaggcagaatcctacatggtatagtccattcttcgcatgtggtttcatctgcaccgctccttgcaatgattttctctttgccatcttctcggtgtccgttggtgatccgagcaaccctgccttcaatacctcgtccatgccacggatcatgtggacagccaacaggtcccgtccagtgaaggataatgcgtcactccagttcaaggatggcaatctcatactgcgagacttcgatggttctctggtctggtcgacgaacacatcggacagccgtgttgtcggtctgaatcttgctgaaactgggaatatggttctcttcgacgcaatggggaagacggtgtgggaatcatttgagcacccaactgacacgctccttcttgggcagtcactgaggcaagggaagaggcttacttcagattccttggcaacaaactggactcaaggtcagttctatctcactgtacttgacaatggtttgtatgctttcatcgaagcagatccaccacagctctattatcaaagaagattcaatatcactgatgccatagttcagccaaatatgaacatatcctctgatggagcaaagaactacacgacttacatttccttcttaaaaggtagcctgtcagcatttgttagcttcaacaatactgatatcaatctattcgatatatcactgccgtcgccatcttcagcacagttcatgagcctcgagaatgatgggcacttgagagtttatagatgggatggtacttcgtggaaacctcaggctgatgttctgcatgtggatcttgatgattgtgcatatcccacagtatgtggagattatggtatctgttccgaaggacaatgcagttgcccgagtcggaattctggggatgaagatcaatttttccgccaattggacaaccggcaacctaacatgggctgctccctagcaattcctctgtcttgtgacttgacccaatatcaacagcttctccccctcccaaatgtcatgtacttcaatttaggacaaaattggaccaccgacgaatatagctgcaaggaggcttgcttgaaggcctgttcatgcaaagcagcctttttcaagtataacaatgtctctaatggttcttgctacctaatgccaaagcttttctcactcatgaattatcagcctgaagtagttggatacaatttatctgcatacatcaaggtgcaaatgttacctccaccaccaagaagcaaacaattaaatccattagtttaccatgttggtgctcctattatagttgcagttatctgcataattattctcatcatcagaagaataatgaaaaggaagatggatgatgacgacccatttaaaggactggctggcatgccaacacggttctcctacaaacagctgagagaggcgactaataactttagcaaaaagctgggacagggaggatttgggccagtgtatgagggaaaacttggaaatgttaaaattgccgtcaaatgcttgcgtgatattggccatggaaaagaagaattcatggccgaagtcatcaccattggaagcatccatcacatcaatcttgttagattgataggatactgttctgacaagtttcacaggctccttgtttacgagcatatgaccaatgggtctctagacaagtggatcttcagaaagaacccaagaggtacactcagttgggcaactcgatacaagattatactggatattgcaaaaggcttggcctatcttcatgaagaatgccgacagaagattgctcaccttgatatcaagcctggtaatatcctccttgatgacaagttcaatgcaaagatatctgatttcggtctagcaaagctgatcgatagggatgaaagccatgtcatgacaaaaatcagaggaacaaggggatacctagcaccagaatggttgtcatcaacaattaccgagaaggctgatatctacagttttggtgttgttgtgctggaaattgtgagcggaaggaaaaacctggataacaatcagcctgaagcgagcaacaacctaatcaatctacttcaagagaaaatcaaggtcggccaagttctagatatattggacaatcagaacgaagaaatccaattacacggggaagaaatgatagaagtgatcaagctagcagtctggtgcttgcagcgcgactgcagcaaacgaccagccatgtcacaggttgtgaaggtcctggaaggcgcgatcgacacggaaacatccgcaggctacgatgcagctagtaaagatgatattaattttgacgcttcatcccctctgtccccagcaccagtgtcagcacgatgaaactctttttaagtaggaacaccgatacttgttacagtttagttgcagtactgtgtgcagtgtgctagtgtgcatctcatgtaaatttgtcccttgtaatatgtaacatcctcatcaatgtgtgaatgaatgaaatattataacgattttattatcgagctatttcatggtttcccaagtaacaagacgaacagcaaaggtagcatgtgaagggctagggaaaaggtaacatccgaaccttgccatgctcggccacgcatttcgtcgaacacgcggagggccgacaccatctgtgcccccccgaccgccgacggggaggccacgccgagggacaccgcccccggactgtcggcgccgcgcgccgcgtgcacgctcgtgcacccaccccgtaggaatcactcgacgccgcagcccatcctcatccggcgcggcgcggcgggcgacgccggcgaggctggcatgactcacgagcgccagcgcgcggcgacgagggaagcgggagagagggaaagaattataaaataataaaataaaaatctaagcgcgactcgagcactgcacgaatctcgaggcgcacgtggcccgtgctgcggcggccacgtgggcgcccgaggactcggaagagttttgtgtggccgtggtatcctcttccctccactccactctccaacttctcccgcagcatcgccgccgtcgtcgtcgccgccgccgccgcgaggtgagggctcgtagcaccgtccgggagggcggaggaggaggagagatgagctgctgcgccgcctcgtcttcctctccggttctcgccaacccccgggtgagtacgcacgccctaccccgtcttcgccttgccggcccgccgccgccgtcctctccatcgacggcggcgtgaaattcctgcaggaatccgatgcgttccccttccgctagttcatttcagccgccatcattggtcttagcggacttagggcaagatcaatcccgccgcgaacaaacccgcgcgcttccgatttttctcacaaattcttcggttcgatgtgctcgtggaatcgaatcgtcggcgcgaattcgctagttcgttgggattccgaaagggagggaatgttccgaagagaatcgattttataatatgtctggatttatctttcaccaaggtcccatggtctagcggttaggacattggactctgaatccagtaacccgagttcaaatctcggtgggacctattttttctccattttttttctgactcgctgatccttgctaggatgtggctacatccaaaacaccatttgctgagtcgaggcgtcgagctgaatccatttgctgagtcgagctgaatttatatatgctccatgaaatctttgctacgaatttatgctttgttttcatttcaaggatgttgctgcatcaaaacaccatttgcttagttgagctaaatttataaatccccatgaaatctttgcaacgaatttatgctttgttttcattttttattttaaactttcaggggggattcgctgctagctgctcaacaagaaggaaccacagggtgatcttcctcggttcaaggcagttttctccgatcatatacagcccagcacgccgcgcgtcgtcacggctgtctcggagagaggtgatagcttttgcaggccagcaatcttgggatatcggcagatttgtcaggacgctgtatttcttcaacgggccaccgaatcctctcaaggtttactcactgtattgggattttttttcacctcttctcgttacagttatttcacatttggcattgtgctcatgttttgtctgttcaatctgtagattgtagagtccattcttagcagtttcactggctctgctcctggtgaggtgccaaagaaaatggaatcttctgatgtggtgctggtcactggagctaccggtggcgttggacgaagagtggttgatatcctgcggaataagggaatacccgttcgagtattggtacaatacttgtcaagcttatctacttttggcttctctgttttcattcattattacatggatagtccaacttctccctcttttgttggatctttgctgctcttaatgttgatctaacatttcaaatttcaattcaggctagaaatgaagagaaggcgaggagcatgctggggcccgatgtagacttggtaagccacttgtttagctggatttagattcatgttccatgtgcggtttagtttcaaccaactaggtctatttcaataccccatgtattccaatatgcattacccttacccaatacccaatgtattccagcaatatgattgcctgaggtaagtctcactgttacatttctgctaaccttctagttgtgaatgaaatgaaactagggaattttgttcttaaatgatagtgaaaatttctgtgtattttttatgacattttgtttgaagtgaccacgtatatgcaatgattcactacatataatgaaccttcctatctcattgctagtttgcatatggtttatgtggttattgaatcttccacacctgtaaagacggaagtattgaatatttatattattaaaatttctattttgtgtcagatcataggagatgtcacaaaggaaaattcacttgatcccaagtacttcaaagggattaagaaagtggtaaatgcagtgtcagttatagttgggccaaaggaaggcgatacaccagacaggcagaagtataaacaggtacgccaaatgccctatcatatgttaccaatatttcacgtactctactttacaccctacaaacttacatttaatctcatcttcatgcagggcatcaagttttttgaacctgaggtagctgcatcaatacattccttctcttgtagaatataagtaacaatggatgactgacatcctcattcccaacatacaacatggaaatattgcatcagtttgcacttttgctcgttcaaaagctagttcattatattattttgttatgcctatcagatcaagggaccttcacctgaaatggtagaataccttggaatgcaaaacttgattaatgctgtcaagaacagtgtgggtctgactgaagggaaactgctttttgggggcacaggtaaatctttcattccataccaaaatgttttttgaaagaaatatcggagatttaaatctacactcaactcaactcatattcattaggggacctccatagtacccaaaaactttggtgcaagatctgcgggaaatccagtttttagtaattatggtgatcataacagtgatttttttcaaaacaacaaaatagtgaattgcttgcaactgaatcatgtataaatttatttttccatccctacatgtgtatacatttgtatgttagttgtctttcaatatataagttttttttccttatcacaacatgttagttattttatttaggcaacttatccggaaagattgtttggggagcacttgatgatgttgtgatgggaggtgttagtgaaagcacattccaaatccaaccaacaggaagtgaaactgatggaccaaccggattgttcaaaggtattttgtttttttttaatgatccctcgactccttgtatatgcgatgtggcaattctttggaaaacctctagtctaagcaggtctgtgcaatgtattctaggtactgtctctacttcaaataacggtggcttcactagtataaggacaaaggtacctactgacatgtattttcccaaaaaaaaaaaaaacaaagttgctgccgttttgtgtgttgatttatattttatttccatgtcctaactattaggaataattaattatttgtcactcttacagatggtgataaataatttgccactggacccacatgtcatagacaaatgaggacccacatgtcataaacagcgagtggcaaataattaattgccacatcttaaaagtggtacaaagttaaatgtccctaactattattgtgatatgttactctgattgcagaattttacagtgcctgaggatctgtcagcatatgacggtattgaactacgtgttaagggtgacgggaggcggtataaacttattgtgcgcactagctttgaatgggatactgtcggctacattgcaagctttgacacgactaagggggaatggcaaagtgtatgttgtatttgttgatttattgaaaaaaatacgtccctttgtttcagcaacttacagctatgcttcttattgatggaacaggttaaattacctttctcttcactgaatcctgtattccgtgcccgcactatgcctgatgctgcaccctttgatgcaagcaatgttacttccttacaggtacaatgtgttcatgtgttggtataattttttaggaataactgaacctgaaattgctgtgataattctgtagctcatgtttagcaagtttgagtatgacggaaagctgaacccaacatttacagaaggttcatttgagctccccttttcaagtattagagcatacataaacgagccaatcactccaaggtttgttctttgtactagttttactatatgacatcatcagaataaatgagcactgtaatcgtccgattgtttggaagtcatcaagactcactagaataaatgacaattctacttgcaggtttgtccatgttagttctgcaggagttacaagacctgagagaccaggcctggatttaagtaaacaacctcctgctgttcgcatgaacaaagagctgggctccattctaacttacaagttgaaggtatgcgccatttttcctttattattgtgcatttgtgcttattgattcacatcatgtctaaatgcttatcgcatgtcctttcagggtgaggatttaatccgggaaagtggcattccatatactattgtgcggccatgtgctctaacagaggaaccagctggagctgacctcatatttgaccagggagataatatcacagtatgtagaggcagcatttgtttgttgccttcataagatgccacgccattcttcttcctccataagatcaaataaagcatcagtttcatataagtttcctgtattttttttttcagggaaagatatcaagggaagaaattgctttcatttgtgttgcagctctggcaagtccaaatgcagtagagaaaacctttgaggttaaaattctgcaactcatttgcaagacactacttgggacaacaaaacttcagaaggaaattgtggcattttatttcattttaagctaactcatgtacttttttttgttaggtcaagagcactgttccattcagtgaacctttcgtggttgatccttcaaatcctcctccagagaaagactatgatgtgtatttcaaagagctcaaagctggcataacaggtaaagaggcactagaaggaacacctgctcaggtctgaagaacatgttaaatgcagaacgcccaactgctttgacaaatcttgacatggtaattctccattgtatttaggtcttaaccacttaagatatatgagattataacgctgaatttcataaattaacttcatgataggtgcttcttgaacatgaacagaattacataaatatgcaagtctgattcataaaccaccaatagttgcagtacctgagcatatgtgccacacttaatctttgcagtcatgtggtttccaaaataccaaatgggaagtactttgtgaagtatgtgaaggaacagttgtttcttttttttatgtaaagtagtatatcctctggagtttgtgttatatttaatctgctgtatctgtatgagaagatatgcatacatcttcagaagacatatggatgtcgatcaagagctcaaaggttatggagcattggagctctttctgtagcagattctgtatattatgttgcttttattttcactgaattgtgtgctgtagatagcgtcattggaatctagatcgaccattttgtaaaatcaaatacattgtcatacagagagaagagaagtttacagttccagttttttttttcaaactttttatgtctctttttagtttgcccctctattggttactgcaacgcacccctcctttttttaatttaaaatatacgatgaagaaataggaagatgaaacccctcaaaagagagaatgaaccatgaatatgaaaacaaggtacatccatatcactagaaataaatgaacagttaaaacacaagcattcatatattttgcacagcatcaggttttctaccaaactgaaaatcagtgaacacaccactacaatccctactacacacaagtcatttgagtactaattttctacatgtttcctcgttacaaagccaaaattaaaaagaggaaggcaaggtgaaattactactccgtgaaacgcaattatacatccaatcaatattcccataattacatgaaaaactccctaaactgcagaatcatatccatgagtcctttgcctaatgatcaaagctccccatgcttcatgcatgtcagactgtcactcaccagcagcaaaacacctgcatcataagaaacaagaactgtcattagctaattaagctaggaattcagaagcagaaatttgtcaaacacatttctgcacaagtgagaagagcacatgacacaatagtgcagtgcaaaccacaaaccttcctcctccagctccggcgccggcgcttcccgccgccggcgagcacgagggcctccggccgcaccaccagcggcgaccagaggccgctcttctcgtactcgaagccgaactcgctggtgtcctggaacttgcccaggagctcctcgctgacgtccagcggcaccacctgcaccacgccggcgccggcgccaccgccgccgccgcccgccggagaagaaggtgggaggctcacgaggtccacgagcgatggtggtgaagaatggcaggtcgacatggcagcatgtcctggtcagggcagacagaatgcatgaggagaaggaagcaaaggagactgatggaatgatatggatagctgatgacgatgatgatgattcatgctgagggaaaaagattcagattggtgtgtagtttgtgtgtgtgtgtgagggacaatggcagggagcagcaagcagagaggcaagaggcaggtgagctgttgtgtttgcttggttgcagggcaagctagctgccaagatgaacaacatgcatgtgtgtgtgtttttgtggttgtggggctgggagtgagagagcagaaagaatctcatgctgccttttctgcagttggagattgtggttagaggggacttttaacggattaggattcacgtccacggtgacttaatcattgacatgtgagccaaggtttagagcaggtacaatagcagactataagctagctgcaaacatattttaagaagataaataaggagagaagggtagcgggctacagatttgtagccagctgtagcacggacttcaagacgcaatgtgtgtatgacatgtgagaccaggtattaatagagtagtatataactattgtatgaatgagctattagattggttatacatgaattggagctagtagttggctatactattaaacttgctcttatggggccaatatattagtgacaattaatgtcacctgactttgaaggttgaggatgctagtttctttaaaacatgcatgtagcatactatctctatccataaatataaatatttctagcgtttaaaatttttccttaaatataaacatttctacagtattatatcattgagtatgatgtttctcaaaatatcaagttttggggcgtatcaagcaatttcacaacaaccttaaatccttaattttcacgtaaaggcttatatttgtggacggatgaagtaactactgtctaaaatcatttaactttataactaatgtttcgagggtaacccaaatagaaacatgctcctataggattttctctttaccggtgttcagtgttgtgcatgcagggctgcatcattagtgcatgcattgtgctaggccaacttttcacatgcctgttaattttaattaactaaaagttgatgactctggttaactcctactagtacctttcagaacaggtaggcacaagatctgctggtgtgtttaattagccaggcatcagctataatggaactttgctttctttcttcctttcctttcctttccatatgcttcatgtgatgcatcgctgtgatgagatgagatgagatggagatggagtgagatatctgaatctggattggttcgtacgcatgatggcaaattttgcaacagggggatgggatcatggacggtgtccacccatgcaatggtgaccatacccatagggcattggaccataagatgcaaaaacggcctctagctagagcgattcacggttggcacgagccatgagatgcttccacgaggtaagaaggttgcgttctagaccgtccgatcgtgatccaacggtatgtaataattcgtttgaaaaatataaggtgttagatttttacagtctccaaccttacacttcgacatagtgtattatcaacaattataaaagtaacatcaaatgaaaatatcttcataaacgaatttaacgctaagtgacgtactagtcaaaattttcatatattgactttttgaaaaacaagaacgcattatattttcaaacggggagagtagcacacgataaccagagaaatgaaacccccttgccattatgcaattaactatatatggactgagactttcagtttatgggcctgagcttgattaggttagttaggaaaaagtacaagaaaagcaattggcattcatgagaataatatgatgttctactattctctgggcatcctgattcctgaagacatgaacagatgaactgccagtaggtacgtgaccctaccccaatcttttccgatccatatatataggtaggttattcagatcaacaatgctgacgagattacgagaaacgtcaaatccaaccaaactgatgtagaaaaaagttaggcgcagcgtgattaaactaatctctagttaaaatgactacatcaactccatcaagaaccttatcatatttgtatagcaagattggctcctttctaagtaatgatcatgagaagtaatgcgtgacatgtagtacattgtagccagttgatgttaacttctgagcagatatctccattccagatttttgaaagaatggacaaatggataaatagggacttgtttagttcctattttttttcccaaaaacatcacatcgaatctttagacacatgcataaagcattaaaatagataaaataaaaaattaattgcatagttttcatgaaaattgcaagacgaatcttatgagcctaattagtccatgattagctataaatgctacagtaacccacatgtactaatgacggattaattaggctttataaattcatctcgcgattttaagcgagttatgaaattagttttttcattcatgtccgaaaaacctttctgacatccagtcaaacatccgatgtgacacccaaaaaattttcttttcgcgatctacggggaatttttgaaatggtgccatgcattcaaacaactcactcaaagcctcccaatagagagcaataagggggaaatttccagaaaataagagtgaacatctcgcatgccccacatgaaacagcgtctacagtctacaacatcaagaaatctagcggtactggaaggtataaaataccccaagcttgtttcctaaacacagcaaatagtttttccatcttctgaaaaatgttagcattcacaagatacagaaataccggtactatgctagagaccagcgagagcattcaacgagatcaggcatcgcaatgtggctttgcccccacaaataaaacggaaatctaacaccaacttggtgccagattatatcagtgtgtgcatatgccttcaatcctgtgaaaataatacaaaagttgtaaggagaagcaattgatatcatgatggcatatgaaataaaagcaaaactatacagcaaatattatcattacctcttcaattggggtgctttcttcattttgcttcttctcatccgccccattttcttggttctgaccatctgtctccatcttttcagtttcctctgaagcatcagccatattagcatctggcttggggattgcaaattcagcaggaatttggccagtgctcagtgcctaatcatcacagtagtgaaaaagaaatgtgagcccatagttagctgttccaaactgtacaaagcgcaggagctaaacgaaaggacatgctaccttttcaagccttgcaacctcctcaagtgtctgagaattcacaatggcagcctgcagatggaataattgttaaaccttgaattttgcaggtagttgtactataccaccatacatagaagatattgacatcaacagagagccatacacatatctaggaatgccaaatgccacactaactacaaacagttagagtttagaattatcaaagttaaaaatcaagagcatactaacaagccagtagaagccatagccacaatcatttttttaatgcagtagctaaataatatagttatttgcacagcttgcaatagtaccttgatagctgtgatttgctcaggtgttggagcaactacttttggaccctgctcctccattgtggtatcttgagcatccaccacctgtccaggagtaaaagttttggctggcaccttctttgcctcttcctctgcctcctttgagtgaaacttctgtgctgctgcaattctctcctacaaaaacaaaagatctcacgcataacttcagaaattaacacaaatacatgcacactagataatattaaaaataacacgtaaactaaaaggcattcatgtatttaattcattgcgacacaaagttaaagagtcgctcttttgccctttttcctgccagcacttctgcagtccattccaaaatcattttggcagtcattccaaaggaaatgaatgaacaacctgtggggaataagtaaactaatcaagcagcaacgcagtttctgcatagatccacatatttcaaaatgcctttgtgaaaaaaatatatgtacaataatataaactatataggcttgcaatgctgtttaattttgaactcctttgaaataatcgtatgctacatacttgcataaataaaacatgcaaccttaatgagtgttatgtcaatacatgcaaaatatcacaatatgtattttatggctccattaaacatttaaaaataagaagcgattaacttatgaaacattgatataaagagagttcacagaagcaccattgcacatagagctaaacgaaaggtgtttactgtttagtgctagaaactaccattagagatcaaatggaagaaaatactgagaaatttaaataaaaataaaccattcaaaatagaagtttttacagaaacttcaagagaacaaaactaagactaaatgattaacaaatttcatacaaaaacatatttacatgaaaaagaacctcagcattgctaacctgttgtttcactttcttgaaatccagcaaccgcaaatgcttcaatttatggatcacatacaaccggtagtctggctgcttggttacagtattatcaagtaagctaagaaactgaagctttggaagagatgccaggggatcgatctccgcaagatttgtaagacgattgtttgtaagcaccaatgtatgtaactttggcaagaactctagaaacaggagcaactgaaggtaagttctggagcaaaattatgaaaatgataaacagatcataacaagataaaatatataatcttaccaccaagattgggattgatacgtgtgattctgttattgttaactaacagagtgccaagacgattcaagtacgggaagttctcaagcttgacaatctcattgtctgacaagtcaattgtgtcaaattggtcctatttgagagcaaagtaacaaaaagaagtgttaaacatgctggagaaagaagataataaaacaaaagctgggtcaaatactgaaatgagaatgagtattttttgggatatcaaatcagatcaaaatgaccatactagttatttaactatcaagtgattgacatgacaaaggaaaaccaagaaacatgtcattcataacaacagaaagtatgccgttaacatactaatgctttgaaattacatgggcacattgtacaactaaaagacagctctatcagcaaaaaacactaaaagacagctctatcagcaaaaaacaatgtgtgggacttatttcctctaaacttccatagaagaaaaacatgcagaacctcaaaaaattgccaaaaagaagagaagtgctaagctacctagcgtcagcatgtacagacaaattttaatgccccaaattttgtaaaattattatgcaaagcacttcaaatcgcagcgttgttaacacatactcaactgagaatatgagttttattccattccagagatcgaaaaagataaaattgaccatactgattatctaactataggtgattgacatgagaaaggaaaaccaagaaatgtgtcactcataacaacaaaaagtatgccgttagcatgctaacgattagaaattctatggacacattgtacatataagatagctctatcagcaaaagaaaaaaaaagttcttccagactcatgtgggacttatttcctctaaacatccatagaatagaaacatgcagagccgacagttatcaagtcctacaaaaagtgacgactggtgctacagttagtcctaaagtctttgagggaacacgacttgagggggcacgactccatgtgctggccgcagaagacgcaatggagttgagacttgagcgaatgcttgggaggcctggtgccttggcctatcaggccctgctgagtgaaagggagattgagagctcattgggtccatcaggcgcagcaagttactagtaacagactagaagtagaagcaatctatgtatgtaataacaacctgatagagtagtcaactcaacgactagtcctcaactatgctccgaccagtctactacccagtagacggtatctcaacccgactttacaacttaacaaccatggcagaacctcaacaaaatgccaaaaagaagagaagggcacactcatatgttagtaatctctcatacctatcgtcagcatgtagagacaaaatgcagtgccccgaattttgtaaaattattttgcaaaacacttcaattgcagctttattaacacaaaattgacgctacgaacttagtagcattatgtactacatttcttgcatcactacctagggcacacccatatctactaatctcccatacgctacatccaagagtaaagcatgttccaccaccaatccaagaacccatcataatacttcaaatgagacaacaatggagctaagggaagaaaaggcttgcggaagctggtggagctcacctcggtggcgcccagattctcgatgatggggatcttgttacctgccaaggaaaagaaacacaacagacaaattaaactaccgagacggagggaatgaaaaaagagggccaagaacactaaaccctagatctagcgagcagggaggaaagagcgcgcaaacctcggatgtcgagctcgcggtccttgacggcgttgaagaagtgcgggctcttccatatcaggtcggcggtgagcctcaccatggcgcggccgggagggcgggcggcggcaacagcttcgggtcagtcgggctacaaactcccccgcggcgcgaggtcgaaaccctagtgatgacgaggaggggaaggaacggcaaggcggccggagccctagcaaacgggaaggcggcgaggggaggaggtggaggagggcggccgcatgctcgctcgggatggcgaggcggcggcagcggcggcaaaggagatgtggaggcggggtgggagagggttcaagggtagggcttttgtggcggtgctttacgatgacaccctcgtagtttttattaattgaagaaagcgtggattttaagcaaaatctgctcgtttgtacggtgagaaacagctgattgttctagaaaaatagggttttcgcttatagtttattttttaattttataactatagcttctcaaaatctgaatgaaatgtagtactgtttatgagagcttctaattctcggagaaagtgcagctggcaaaagctccccaaacatggatcatatagctacgacaacctgacccaatggggacacaagtcaaaaaatgagcaaatgtcgaccacttatatgtgataaaattgtaatatctcgaaatttaactaggtgtatgaaaattcggagggatcatttgaacactaagaaaaaaaatcatttatgcaataatttaattgtattatgtggaaaaaaaataggactccatcggatggctgattgagctaggggcgtttcagccgaagcccatcagatggctgattcgattaagctcattcagccaaacgaagtgagcgcacaatggttgtgtatccaactctggcaacaaatcctatgatccttctagtgctcacagccccacacatggaaacacctaaaaagaaaaaaaaaacacgagcggttggaggtgactaggccaacggcggaggctacaactaaatagccacaaaagatcaccaacactatactggattatgtcaaagaattgcttttcatagagccgttaaaatctccgtatgccagagccgcccagtcaccactcttattagcgatctccaatgtactcttatataagaaaaccccaaagaacgatatactatcaaaagaaaatgagaagatccaaggaagaaggaagaatctgaggtctcaccaacccaattttaaaccatcataccagagtgcattacacaagacatacactcaggagagagtcatgaagcaatagaaacaaattatgctgaggaggtcttctaccatgctccaatcagctcgcaaaccaactttcagtggccgtgtttgttaatgatgcttgcatcaagcatagaaagtcaagctatatcaaattacacccagttcaattttctttgatatccattagagagttagccccgaagaacaaagagatacagaatttgcatataagaataaccaagtaaaaaaaagcataaaaccaagtgatggactgacgacacaagtaaaaccaataatggtgaaactttaaatgaaaagcaaacaacaatgtgagatcttaaaagaaaagccaaatccatcaaaacaatgatcgatgaagacaaaatgaataattaaaagggaaaacagaacaacgagagcaagcaaagaacacgaatgctatttgtcacctgccatcacatgcgtccggtgatgatgacaagaaaggatgagtggtgtggggatctactcccaccgtcccatagaaaacgaatatagaatcgaatatgacacattctagcactttgaatatagatagatatatgtttagattcgtagtactaggatatgtcaaattcggtaatagatttattttttatgggacggagggagtactattttgtggaattgtttgccccctgatgacctattatttatcgtaacaatgagataaactagtaaaatcataaaaaaaatgttccaaaaaaatttagataacatattattaggagtttaggaccacacgaaaaatttatcaacaaccaggactatctagtatttcctttttcatcagaaaaactgatttatatcaattcatatatttttagttttctgtgtggaacccagtgccttcttaaaaaaagtatcactactttttttttattttcaaaaggaccattatgcccctccgcatgcccggagcagttttcccattcagcctttctcccgtccacgcgccatatctctctccccctcaacggcgacggccgccgccctcggatcccggcgagagacaaccttctaccttcctgcccccttctctccccttcgagttccaccccttgcagcgccgctggcccgcccccttccggcctcagatctgtcaggcacggctatgattgacgcgcgggcgatacaaggtcgtgggcgcggcggcggcggcggtggccgcagcggcggcgactcgaagctgtctacgcgagcttgccggaggtcgagattatcttggtcgtgggggacccagcttcagcgcgtcgcggcctccacctaccttccctaagattccctctcgtcttctcctcctacttggtttcttgggaccaagagaaattgtacgccatgctgcaagaattcacctcaagtttgctttgatttcttaatctgattcgccgtccacacacacgatgcgatcagctaggctcggccaccgcccgttttgggattcttttccccttccccgttgtacatattgtgattaattgcccttagttcagagcagtttatttagtatcgatgttgatgcacacgctgtggttagagattgttctgctggcttatacacgagcaacggaggattgggtacgaccaattcagagaattcgttagcttatgtactttcctcttaaccgaaacagcaattgtgcttgtaaattggtggcacggtggtgttgcctagttttatggtcctagacttgtcgatccatcagttgaaaaaatgtagtggaatcttacaagttgctacttgccagaactttgctttattatcgtagacgattaaaggaccataaccttctttagtatacataagtggcggacgtaggattttataaatgggtgtacgataaactaatctacttataaaaaaaataaactatctatttgttatacaatattatctctaaataaatataaagcccaatatatcataaaagttggactagaaataaactaaatcttatttttatctttaaatctcattctaatacatagacatgtaactagtaagactttgtttgcaaatgggatagagataaatattgtccatccattcatcacacctcatttaatcctagccattcatccatttctctttcccaatccctactctcataactcatttgccaacactacaacaaaaacattttgtagaggctcttttgtagagacaattttcaaaatacctctaagttttgaagctctatagtctagagacactttttagaggcatttttaaaatcacctaaaatatttatttttactatagagacactttagagacatttttaagatactttgttaaatttatcttttagagacatcttttcgacactttaaaatttgcctcatacgtaaaggcactttcttaaggcatttaaaataatgtaaagacatttttccaaatattaatatatatcaagtaactagatataagtaacacaaatcacatatttacatttaattatatgaggttgagatggttagtacattgaagataaaaaatgatcaactcaagaggtcatgagttcaaggattggtaagggataatatttttctttctttttcatattgatttgctatatttgccgtaaattctttctttttcatattgatttgctatagttgccgtaaaattcaccaaatggcacttataaaacactcttcaaaatgtctctataacatggtaaaggcattttaaaaatgtctttatagtattaggaaggcattttaaaaatgcatgtaaaggcgttttaaaaagacactcttcaaaatgtctctataacactgtaaagacattttaaaactgtctttatagtattaggaaggcattttaaaaatgtctctatagtattagtaaaatctctctacaaggtatatttgttgtagtgcaaacacatcctaattagaatatccgtaaattctttctttttcatattgatttgctatagttgccgtaaaattcaccaaatggcacttataaaacactcttcaaaatgtctctataacatggtaaaggcattttaaaaatgtctttatagtattaggaaggcattttaaaaatgcatgtaaaggcgttttaaaaagacactcttcaaaatgtctctataacactgtaaagacattttaaaactgtctttatagtattaggaaggcattttaaaaatgtctctatagtattagtaaaatctctctacaaggtatatttgttgtagtgcaaacacatcctaattagaatatcatcactcacttcttgaacaatcctatcttcctatataaagcaaagcatgaaagaagccacatcatggcatgtaagaagccacatcatcaataattctaattcgtagagacaattcaccaaatggcacttatgagacactcttcaaaatgtctctataacactgtaaaggcattttaaaaatgtctctatagtattaggaaaatgtctcaacaatgtatatttgttgtagtgcaaacacattctaattagaatatcatcactcacttcttaaacaatcatatcttcctatataaagcaagtcatgcaagaaaccacgtcatggcatgcaagaagccacatcatcaataattctaagccgttggatcgcattagtacatagttatcagccgttggatcaagaagctactcatctagtcaccttcttttagattataagtaggcgtgacattgttatccattctgtacataatattatgttttctcctcccaagcaatccaagataatgcaaacttatcttctttatttaatatgaaattattatataagatatgaattttgttttgttataaacaattggataacatagagtaattaggcattattaatccaaacttatttttgaaataagcttgagataaagtaaagatgtgcaaactactctaattatgacggcatgtatattgtgcatgaaaataacttacgtatatcataacaatacacaatgacgttttaaaataataaaacatgaattgtattgtaatagcagaggctatatatgaagccacattatcatttattttgtttatatacagagttacatctaattatttaaaacattgattttatttgatgataaaactagcaaatcccgtggcaaggcgcatggtgccaactagtatatatagagcattattatcattggattctcaacaagtgtcgatctctaattcatctataaaaaattatatgattatttatagcattctagattatgtttaataaaaatatctttccacttcttagaaaactagttaggtaccttatataattacaatattattaacaaatatactaattattatttactcatgtaaaaacatagataatatatattacagagcacacacatatgagttagctactagtattcatgtgcaagtactagtgctgattgtagcaatattattataaaaaataaataagaatgagaaagcgagaagaagatggaacaacagaagaatataagattaaaactttagttttacaccgtattaagacgaagaacaattttgttaatattagtatattattgattaatgtgagtatataccataccatgaatgtgagtaactttttcccacgtgtgtttgagctaatgactaaacctcctttttttttcttaccttctttcgaagttctcctaatgtgttcggtaaaaaaatgttttgttttgaataaaataaagaaacattttttgactagattattttttaagagaatccactatgtgccgcttactttgtccttgtactataatatggcactgagtttgttaagttatacaatatgccatcgtattttgcttaacctctataatatacgtcaccgtccatttagacttcgttagtactgtataattttgttctaatgaccgaaatatccccgggacagaaattccaaaatttggctgaatattctgaaatatcatattataaacaaggcagagaagatattcatctcaaactttggaagttttacaatctgatatttggaatttttcgtcccatggctatttcggtcattatgataaaattatataatactaacagatgctaagtagacaacgatggtatgttatagaagttaaacaaagtgcgatggcatattagaacttgacaaacctagtgacatattatagaataaggacaaaatcaataacacacgatggattctctatatattttaggaaaaattagaaccatgccattataattttgcaaaatctgatatatgtcatcctgacccacatgtcattgactcatgtgggtcctacatgtcattgagataccgatggcatatctcaaattttgaaaaattataatggcatggttccaaattaccctatattttatggttgtttagttcattacctatctactatcgtgcaacatttttataaaaagttaaatcttatgctataagttcatatcatacacattaaattacatacacttataatataattttcaaattatacaatgccatcttcacattttataggagaaatatgaaaaatgatttattatctatttaattatgagaaaaagtattagtccaaattaatgtatatgtagaaaaaaataatatgaaagaattacggaaatacctacaatcgtatatcatgcagtaagaaaaggagaccacaatcgaatcccttattgttgagcaaaattgatggcattaattttatctttttttagctaaatctatctgactataattaatcagcccgtgttagtagaagtctgcatcttcatgcatcaatatatcataactcataactcataagactattagtaatagccaagtacactgacccaacaatacttaatatatcacaagactatcgggtaatggacaactcatctttgattgtatatcacaggagtatcggataacagacaactcatctttaattgtgctaaagaaaaaaaagtaaattatagttcgtactatgtattcttaaatgttttcatattatgtcagcctttaaccattcttttcatttacagaacaactaactttacatttcaatttggaccaacctatttcatccatctccaagtccaatgactctataaccacacactaactctctctttctctccattttattttcccccgatagttggggaaccgctagatccagcaagaaggagcctggatctagcgtctccactcttcatcgggtcgactcctgcctccgtgagtcgctacaatagtatgcatgacaagagggagaggaaaaaaagatggctcatggagtgcaactagagggtgcagttgcgcatgcaaagacagagaggagaaacgatggtggctcataaagaaagagtggtggtggcggtgcgtggagtaatagttagtggttactggtagtatgaagagtttgttgtcgactcaaatcgctaactgagtttgttaatttttagaatgtggaccactagtcattataaagaaatagtcattataaagaaatagctagtcttataaagtagtaaaatattgagatatcataaaggtgagagtactcgtctagagcttttaactttttaccatttttaaaatatggtaattaagaatttactactcacaatctataatacgtggatccttatgtgtatatgacacgagaatgctccttctcggtcgcgcgaggggaggggaaaaaatcggtcgctccacccttcccccatcacgtgcgcaccagcaatctctttgggcccccaccacatgtcccctgtccccacctgccacttgtccacacacacaactctattgcaacaaatcacccacatattttgaaaaccctatattaagggaatttggtttactttttgttccaccaaaaaagtttcacgtagtgtactcataatgtttcactatgtatagatctaatgttgcagtgaactaaaatattccattgcaacaaaaaaacccacatattttggaaaccccctattaagggaatttgatttattctttgttccaccgaaaaatgtttcacctagtgtacttataatgtttcactatatatggatcaaaagttgcagtgaactgaaacattctttcactatttgctgaaacattgtttttatataaggtaaaacaacacccaattgaaacgagtgaaatattttcgatctacttagtaaaacaattccgatatacctggtggaacatcgtgcaacatttaaaaataattcaataataaggtaaattttttttcgtcgaaatatatgcctgtgtggccttgttttgaagatttaattgcagcgaatttaatgatgcaatcggattatgatatggataagtaatttaagagaaaaatcagtttaaaatagtttttcacgtaaagcgtccgatttttctccaaaccgatcagacgcacgatccgtagactcgtccgtccgtatatacatgtgggaccagcggtaaattcttaataattcccaatagtaagagtctgagcgtcttccccttccctttgtggcgtaaaagaaagaaaagaaaatctcccgtctctttgtctcctccgctccttgcgccgccgagacgagtcgcggctgaacaggggaggggcggcgatctccatcggggcgagcagagcaggggagaggattcatggtgagcatccgcatcctctttctgattcatctctctctctcccatcgggactacttttgtctggaatttgcttgcgttcgttcgttcgttcgttaaccctagcttctcttctagatctggaagaagctcttcccttaatttcagagccttaaccttaatacaagtaacagtttgtttattccccgagaagtttgaacccccatgtcccaagttggatccgctcctgtacataatattggcagcttgtggcactcttgaatggaggtcttggaagatactttagtacctgttctattagattggtgtgttataggccctgtgtggaatacaagaattttgctcggttttcacctttaattttccttgtatttccaccttgttttgttagatcgctgttgctcacttgcttgcaatgtaccgttatctgaacatcatatgctttttttctacttgtggacaggtttatcactctagctttgttgatgacaccgggattaccaaagcatgcggctgtcctttgcttccactaaaaactcatataaggggcccagcgccagcattcgatcaaggtatactgacacggtgacaacataaaatacattgtgatatacttccgtggtttcactctgacagaaccatgccaagctgctgatttatgtcgtgctattacagacaaggctgacattgttgatgaagcaattacattcttccgagcaaatgtcttcttcaaaaacttcaatgtgaaaagcccagcagacaagttactgatctatctgacattttacatcaatattgccctgaaaaggctggaaggttgccgaacactggctgttgggacaaaggcaatcattaatctgggtttggagaaagttcctgtgcctggggaaccagggtttcccttccctggtcttttcactctaccccaatctcaggaggaagcaggtatatgacttcatccgccactaccacatttgtgtgcttgtattctcttttactccctccgggttgataatacttgtcgttttggacaagagcacgctttccaaaaaacaactttggccattatttttaattataatatgtataaaggtgttaacaaatatatgattttattaaagtactttttaagactaatctatacatgtagtcaccatattttaaaaatgattcataatcaaagattctaaaatttgacctcacccttgtctaaaacgataagtattatcagtccgaagggagtagtttctcaactgtgtgaaatcattgttgctttttattcctagagaaaagcttgccttatttctcgaatagttagtttttcttcttttcccccaattgtttatccatgctgcttttcttctataccatactatttgtcctggctagggaaaaaacaaaagaatgaagcctattggaaatttagcttttgtgagattacaaggggacctttccaaactacagcaatttatgtcttagatacttttattttggatttaactaaatctgtagtgaactccttatttgatgtcctgtatatatgttttttttttgtcaatttctatggtctaaactataagtctgctctgggtatagaagcaataagttgcttactgactattgacaactgtttttaggaacatccaagttgtaattgcatcagttttttttttacttctagggactaaataaaacagtaactttccatctctcatggaatgtgatctcaattaagcatttctctgttggattcagaactattgaggaattatctgaagcagataagggaggaaacaagtggaaggttgcttaactgcgcatacagagctaatggtactccaaacaaatggtggttggcttttgcaaagaggaaattcatgaacattgtcattctttgaagtataggtattttccgcgacatgtttgagcaattgagcagcttgtaggaatggtaattgcacttgcgtacttatttctgcgaatactttagagaattaaaggaacgacaatgattctacacctcgattgatggagccaaaggttctaatgaaacaatggatagaatgtcaacaatttgtttattgcaatggatgaacacaaggacacctttcagctgttatgttgaatttctatttttcatttttattgtactccgtccgtgcccttaaattgggcatgtatttttcagatgatgtttgaatagcgaatgttccgtgtaggacatttgtacagatttaatcaggtgtaatgagaatgtgaatatatattttcctgatccctcttttttgtatcattcgtgttaatcctttatctgtttttttttcaatatgattataagatatggagaaacctggacgtgcgcttccctgatcttgccaaacgttgggagtaaactgctgcttataaacacctcaagtgtgaattggcatggttaatttcattattcgatgaagcattctttgatacaaggtgcttataaacgatttgaatgcaaagcccattgcatcactgagacctgaggtgatattcaagctctatggcttgtcagtcaccatgtcattcgacacaaaggatatctaatgccaggtgttcatacatagattcagaaaaacaaaatatcattcgacacaaaggatatctaatgccaggtattcatacataggttcagaaaagcattattgaccaccaacgcaacgcccaacagaactgttacattgtgtaaatcctcttcgacaaaaaaaaaagaaaaaagaaaaaaaaaggagagagagagagagagagagagagagagagagagagagagatctcaacctgatcacagagttaaatcccatgacataaggacatcagaagactaaaatgtcgtttttagcgtgtttttaccatctaaaagttccatcatcctggcatgagcaaatccaacgtgttgcttcagcaatcttcatcagagtataataaactggctaattcaacaaccatctccgggtcttcctttctacatgtttgcccagcatagtaaataatatgttggtgttcaaaaacagctaggtttggaaattagcccagttacaagctttccagatagcattgcacaaagattctcaccagtaaatagccagttagttatggttctgcaaataaggcagaaaagggggctttacatgtgacacaaaaaacaggttcagtccatgcatttcttaccatattacatatatgaagatagctggctaaaagtaagacgaagcatgatatggttgaaagcatcaaattacttccacaaacactacacaggataagaagaggaaacctctttattgtttttaaacccagaccaaattttgcagcacacctcagatgaacatgtttccaaacctcccaggcaccttctcaaatgtgtggtcctgagatatttagtattagcatgaaataggtaccgtaatttttgttgggaatccatgctataattttctaaagaatgatgattatataagctaataaaaaggaacttgctcaaaaaccaagtaactaacaagagatattacccattgaatggatgagataatcaatcaaagtatcaaactaacgatgttgcaaagagcatgtatgataaaattgtcaggccatcacagttggtatgtgtcacacaatctcattggttgaatttgatttgaaaagttaaatttgtttgaaatggtaggcttgtagagatatggccaaagatatccacagctttcaatggaagttatctttagtccccagtcctctacaacacatctatctaccaaggattgtacaatggagataactggcaataagaagggctaccactcagcatacagatattagtctaaatcatttggacaaaattccgctgctaaagcaaattcattggttctagcacaaggccaaggctatggcatacagcatgtgatggagttctgtcagatgctatcgcataccttcatgttcaagagccgagcaaagaaaacatatgtgcaaggaataaaacaccatagtgatctgttaagactttaagaacaaaaaggaaaagaagccagtgccagtaggtttgggaattagcaatttatgattttgagtcacatgcagtaaagtacccacatcctaagtgactaagacactggacgaaaattaactcagagtctatgtatagaaacagttgttgaccacgctacaacatgggtatgatgctatttgtctgattttccaaatttaaacttgtcagtttcctatgctgctatgaagtgattattgaatctccaaatccaaagttggtcttgtttataaggatgtagaaataattccagaggtttttgaagatccatggaagaaataccatgcgtgcattctactatatgacccaaaacggcagctacatactcaaagacattggaagatcaaagcagggtttattccaaatatctttgaagatcaaagcagggtttattccaaatagcagtgcagttcacgtctgccagggatagccatagcattgctggcagatcctcctagagccatcagcctccatgccagagaactcatgctgtgattctcacagagcaatatagtacatgctacataagaaaaatattccatttgttatttaccttatgtccacactcttctttggccacaatcttttccttgttttgttttctaacttaccaggcatttatacataattacctatagcagagtcatagacacagacaagatatgcatatatacttctaaatcagcaagtgctatttagacttcatttacctttctaaaaaaatgaaccatataaaaataatgctcactattatcatctgattaaaaaaggtctagcttttttccacatatattattccctttagttctattggtagtgcaagtttgtaaaaataaatatcaataacaacacaaaatgataagttttcaaatcgagtcaatgtacatgcaactaactggtggaccacatgaatcatattctttatcatgtgaaaatgtccatgtatattatgctttgctatatggaacatccttgtggatattcttcctcatttcatgccctttcaaaactctggagaaacctgatacacaacttattctttggagaagtaccaaaagatgtgcggatcaagcagctcttgggcatcgaaaagccgcataacacttacgagatcaaatcgttagtgcaacattgaccggaacatgcttaccaacaaagtcaaagatttcagtttgcacaaccactgaacttctttgtcttagtgttctctccttccagaaggtctcgcatggctttacagttcctaaagaaaagtagcataactgattaataagcagaactgtccataaaacaaccaaatataagttcatcactgtaattatgatcacaaacatcttaaaatatgcttcataagtatgtctagtagtgtttcagtgaagaataacactttgtagaaacatgactcacttttcatcttgggctcttagctaattcattactatcagcatccctcttctgcccatgattgattcatcaaccagaactgttttgacacggctcagagtgctcccttttcatccagtgctagtcacgtagtgccccatatgaacctggctcagttggtatgccagttttaattgggatcactattaatatacagaaccataaaggttttaagtcatgtacacttcacccacctgcatatgtttggagctaattctactcttgaaggtgtaagcatacatttaaagcagatggagaaggcagtgcaaagattttaaattaacttgctgtattctgaactgctgggttacaatttcctattgtacttgtatgacaaaaatggcactttaatttgtactctgactcatttcaaatctaaggtttgtttttccaaacacatcctaggtggcataaacaaaatataaagtggaaaacgtccataaaacgaataaaacacacacacacacacacacacacacacagagagagagagagagagagagagagagagatttcttagattttgaatcattgctcatggccaaaccacatcaaagattgattgtaaagtttggaccttcggtggtggggtgtgtgggtgtgtgtgtgtgggtgtgggtgtgtgttggggctatggggggatgtggaaaaaatgagccaatttttaatacacctaacaacggtatgatgtttttactactgttgaaaatacaagttatatttatgttccatttcataactaacaagttctctttcatgtcactgcttgataatatcataataacattgtttcagatttcggcagtgatttgatctgatcaaaaccatatggcgagctcctcaggctgcatgtacaaagtattactttataaaagttgtcctttgctgtgaaagaatcagatgcagtaacggattcttcatatacagcttcaagagcacccagggggaagatccataagaatgtcccagaacagagcataatatcaggctatcagcaggatccacgaaatggaaaagaatatgatccagacatggcccatcgaattcaagctcatgttcaagactggttcccttttgtattagcaacagaaaccagaagggtacgggggtcagtcagttataagatgcaaacgcaaaagtgacagtttattagctgctcaagcattgtcagcttaggtagcatattccaaggcatatccagattttactcagtgatctttgtgctatatatacctgagttcaacaattaaaatacagagcaaggaaaatattggaagcaaagaatgacgagaggagcagtaatgggcagattgaataaattgtcagggtgagaatcacagtgcagttctcctctggcatggagggcaagaggagctgaatagctaatggatgataaactgctagcctttccctgccaaaggagagctgccctgccattcagtgaccctgaattcagcatgcgagcttcaagctgtgtgttctgttttcagtagaatgttgtgaagcacactgcatgaggtatgtgatcatgactctgtttttcatattctttgagcatcatccatgggtgaggccataacaacctcctgttttaatagtttatagttcatgaaactaatagttaaagagttaaggccttgagggtgtactacaaatggaaagatctagcaacaactctaagcgacacattcacataacatatccacagttaaagaaggtatcatgagtgtcaaatgacaattaagagaaaaatcactatatttaataataaaaacccaaagaaaagtaacaaaaatacatggatttaataagatatgaagtacctagatagggatgtatccgaggatttgaactggggttgtcagaccaagttggtggcatgcagccttgcaacagcaacggctatattcataaaaaaaaacagaagatgatggtaacaaaggttgttctacttcttcaccacagcatgccaccttgaagagcatcctgtccaccatcgaacctgccactgtttatagttagaactcatttatagttccatagctaacccagtcgctaatccaaatcaagcaccatagatatttggcatgttctaattaaccttcctatccaaacagtgggagcaatcatttgaaaatgtgaaccatccagtttcttgccaatcctatttaagttagacagaaaccctcatatacttaccctcaatattaagagcttcactaatcggattctccattaccacagaaaattagaattttggtacctaaattttccaattaatgaaatcatttgaaaataaaaacttaatagtggtacagcatttagcatgaggtagagcaagatttaagacatggaccaagctgtcacaagcaacagcattgctcagaaaaatgctctagaaaatcaacaaagctatcatgcatcatgatttcctaaaggattgcaattttattacttatagcaatgctactcgaaaatacaagcttcgatctaaattctatatgttagatttaaaataactcagtcttaatatgctacattatgcccgtcccagtgacagtccttatttttcttttaaaaatgtgctattatttagaaaaattctattatttagatctaacatattttaaaataactccgagctgtggccgttcagtggctgcagtgcttatttttcttttttgttataactatatttgttcagctctaatcttgtttaatttagtctaataataggaccttcccctagtatcttagtctaataataaggatccctccctccctccctccccctctctctctctctcttgatttggaggtgaatgattaatgtttatgcatgatactaataattattgttttttgcctgctctgctttttcttcttttcttagcaaaggttctcctgcttgctagctaggtggtaatagtcatggccggggacagagtcaaggccagggggagtataaatgtgcatctgtggttccacctagttctgtgactactgcagctaaactcttctttcatgatgcacgtaagagggtcaaagaacttgattttgggaacctgctcaatataaagctggagaaactgacaagtagagagcttgctgcacggctaacagatcaagctgaaattcaaacaaatcaagaccaaactgaactcaacaacaagcctggagagtcgctatgcatcacggtagaagtagtgcatctaattcttaccatgcggcgtggctctgttcaggagctcacgtcactgcctacaaatgaggcatcaaaagcattcatctcgatatacagtgtgttgaaggtcagggatgacaagttctcaaaagtaaaacccattgggatgctccttttgatgattgacactaaggtacttggtgttgtcatgtgttgtagttaacatttgtttgttcatggaattggcgcaaagtatcaaaggtgttcaaaaagagaaatagaaagagtacactaagtaacatacctaacaactggaaagaaaacattaatgaggaaaatatataatcgatgcagcaaatacgaagtaaatgatacacattgttgaaaaaatgagtttgcaatatttgacactggcacgtaaggaacacagcagaacagaaaattatgaaaatagctttctattttctaatatatagagagaaatgaagatttgtgggacaaccaggtaaaagtctaatttatagagagatgaagatttgtgggccaagcaggtaaaagtctgaaaaataatgatttagatgattgatacataatggcaactaagtggcatagctactatgcaagactgcagtccacataactactatggccattcctatatgcataaatctcattacaaaatgatcatgaaagatctatttgattcctaactaaacatatacttgcacataaagttagggccttgggggagacaaatagcatttgaaaaactagttaactacagcgcgtgaaggcaatgactacctgacatcgtgaaatgacacaatagtaccacaagggacaactaagccaccagaaaagaggtagaaaaaataccacaaaaaatttagtcaagcagttaaagcctaaagatgttatttggctgtcaatacaaaaggggcaagaacaacaaaaagcatctacaaacccaaaatacatggagagtcatccaacttgtttagatgtgtcatataggtcactctactttcaaaatgcacatttgagccatctaactatccacgtgagcacaccttgtacacctagcgtgccacataggattaaaaaaattggctgggtatccgcagccgctgtctcctaggattgcgcctccatctctgtttaagcttgtcgttgctgccacctaggattttgcctccattgctatttacattcatagcttgtcgccgcagccgccgtcaccatgtttgatggcaagcaagataaaggactgagaactagaagaactcatcaaaacaagcataagtgaaatgatttggtttccctaatttcgtgtatctccaagtgctagggttgtgagaaaggaaaaaaaaatacacatgcggttttctgcacatgtccgagagcatttttttcaattataggtggcatgccatgtgtacaaggtatgctcatgtggatagttagatgggcaaatgacttgcttaattcacattagtgacctatatgtgtattttgaaagtgaagtgacctacatgacacacctaaacaagttaggtgaccctccatgcattttactcatatatctagtactacccaccaaagaaatactgttaggcatttgcataagttatttttcatgacagaagtgtaagaactagaatccctggtttattttccaccgtaaatgacaaaagaaatgccgacataaatacattgtcggtggagtctaggagcaatatgccgaataacaggtacagcaaaggaaatacggaaccgaccggcatccaacattctataggattcaaatggtcaatatatccatcagtaaattcagtgtatcaaatgatttcagaacaacctttgtcaactaggtatttgttttatgcatctgaaaaaaaaacagtattagagaatggataaatcataccccgatgattgtcactgagagccttcaacttcatgtccaaagctcccatcatcacaaaccaaaggaagccaggccatacatatacggtctcctgaaatctctcctgaaacagtctctcaagcttcatgttctccaggcaaagtgagaagaattaagtagggggcatggccatcaggggagacctccactgttgccaagtacacataaccagccctaactcacacaactctcatgcccttgtaactgagatatgggtgtcaaagagaatatcttctgtgatgcccatctcgcaattccgttcctgacgactctagggatccagatgaggatgaggaagtctattgcatacacaatgcaaagccctcaatccttagtctccccagccataaaactgcaacccctgtgtcattaattcccatggtaattccaccctggagaattccatggccacggtgttcagcgtcattcaccatcgtaaggccagtaaatcgagccatccactagcacgccagcattgcctcatgttgctgtctccagcaaactcaacccatggatggcgatatggatgatccaattccaatcccatgggtctcggaggacgaaaagaccgcaagcacaaagcctgaattcatccctgtaaaccggaacagcgcggaagctccatgctcttcctgttccagctcgatgccaccgagcaacagcggggatgaagtacacgtcccagatcaaaggggtttaggatggcgagcctcctgtgggttcagcaggaggaggtcgccacgccacggcatgccaaccgtgggaggcgtagtcctccagctcgtggctccacggagggcgacggcggcggcggccgaagtccggggtgccggggaggatggtgaggccgccgtggtcggtgaagagcccgagggggcagggtccgggtgggtggagcaggcggcggaaccccggcgaaaagccgggcggcgcgggagcccacgagctgcaggcgaggaccgcgcggacgagagggcatggagggacgggagggcgaggaggatgtcgtcgttgagggaggcttacggtggtgctggtgctggtgctggggttcggttcggctccacggaggcggcgccgcccattgctcgaatcggaatggattgcgggggtgtgagcgcctgaacgagtggatggacggttgttgggttgtgtacaacggtatccattctctgtattagaaaaaaaagaagaagaaggtcaatcctagtcaaggtttgtaaggaatgtgtttttatggaaactccgttcgtaggactaccttgcatgacgccgttaatttttgtgtttgacgtttgaccattcgtcttatgtaaaaaatttatataattatcatttattttaatgtgacttgattcattaaatgttctttaagcatggcataaatatttttatatttacacaaaaattttgaataaaacaaatggtcaaacgttagtcgaaaagtcaacggtgtcatacattaaaatacggatggagtattgtcgacatttgatgtcgcgattccggtatttgcatagtatggggatcgttggtactaagatatacgcgagactgaggtaaaagagatggagacgatgatttttatacaggttcgggcccctgaattatcaggtaataaccctacatcctattggccgaagccggtcattgatcttattcatcataatcacaccagtacaatatttggggtagcctatctaactgttgtcaacgtggcggtctaaagatctgactcgtagtcgacaacagggtagccttcctcctcaaatctgcatccggcgagatcagagatagcgctagattcctctctttggttcccgtaggtaccatatcgggttttcctaggcttatgtctgatgtcgatatctagcagcttgtcttggcctatgtaggcttgtattggcttgtggctttgtggcgtctatgttgtccgtgtctgttggttgtgtctcctcttctcctagggggccttgtatttatacccataggtgtccccttgtccaagtagaactagggaaaccagtatggatacaatccgagtagtccttgtcgtttccatgtagaactctagtcattcttccttatgcggaactcctcctatatccgaaggttgtttccgtataagacatggtatgtggtgggtcctgccgagatttagtcgactactattaggtatgtggtatccataacactgacagtagcccctgacttcaatgcaaatgaacaaattcatattctcaaccgcagaccctggagtaactgttatcgagttcacgtgaccgttctcggtgagttcagagataacgttagacttcccttatcagcctcgtgcgggcacctatagggtttgtctgagtcaatctccggcgtcaaccaagaaaatacagagcatacgactaagtctcccgtcttgctataatcgagaatttggatggaagtcaagaaattttatctcggcgggtacaccatgtacaccatttcttcattccgtattccttgtcgagatccaccaaccgttctcgagtggtcgagaaggcacagagcttgcgacgaagccttgtcaacatctgttgtactcgccttagtcgatcttagtgtagaaccatagagacatggagttttcaacaatgtcgaatagaatttccttaaatcaatactcagaaaaggatattagatagaaatagcccccgagcaaacgctcaaagggtgacatgttataatgtgcatggaaaactgaaaatgaattaaatttacagaccaatgttttgtgtatgagcgtcttctcttttaccgacttcgatcagtcagtttgttgagtcatacactctccctaacccccagccttttcatcggagaatcgttctcggaggataagtctcttggacccttgacctgccttggttgaaaaagcgctgaccctagcccccagtcgtgaagttggaaaactcaatttccgattacacggcttggttaatacgcacggcgagaactcttacatgaccagatcttacatggccgtttgtctctataggatccgacaaggccttatccgctctgggcgtccctagccaaagttcccttaggtttctcagaggccttgtcaggacggcgtaaagggacatgaggataggtttcaactctaggtgtcgtcgtggtaagggatctctgggtaaaacacttggcgatattgtgtacctgatatcaactttgttggagtagaggtagtgggagaatcgttatacctctggtcgaggaccaggtagtagtcgtaactcgaccacttgaagtagaaatagtgggagaatcgctacaccgctggtcgaggaccaggtagtagtcataacttgaccacttgaagtagaaatagtgggagaatcgctacactgctggttgaggaccaggtagtagtcgtaactcgaccactagaagtaaatgtacgagagatcgctacgattgactggttgagaaccagtgagtaggtgtctctcgaccatttggagttgtgatacgaggaccgctacgttgccggttgaagaccagtcgtagatgttcctcaaccatctgaagtcatctgaattcgtggtgcgaggaccgctacgctattaccgtagttgtacctcgaccatctaaagttaaagcgcgagagattgctacaatttactggttcaaaaagcagcgagtagaattatctctcgaacgccaacggaggttgtagtgcgagagattgctacggtttactggttcgagaaccagcgagcgagtagaattatctctcgaacaccaatggtagttgcggtgtgagagattgctacggtttactggttcgagaaccagcgagcgagtagaattatctctcgaacaccaatggaagttgcggtgcgagagattgctactgtttactggttcgagaaccagtgagcgagtaaaattatctctcgaacaccaatgggagttgcggtgcgagagattgctacggtttactggttcgagaaccagcgagcgagtagaattatctctcgaacaccaatggaggcgctagagttggtttattacatgtgcatctcatgtgggcagcatgactcacatacccaactcgtagcatatccggatgtccgcctgcgatcatttcgggtgatcaagccgacatcgtttgcgagcaattatccgttaacaacccttttctcaaatagcctagccaaagccggcgctatgagataggtcgtcggtcttcgttggtaggttgggtgcgacagctctgcatttgccgagaacgttctcgataatgtatgtgcttgaccacaacctactcgagtgctcacttattcctgaaaaatattttctagaaggcaagatatatagcagagaatatcgagtatatactcaaaaaactgcatggatcttctagtattatcagaatataacgagcagatgtaaacatcatgcattatgtaaaccataaagaagcatgatttatacagaagaaaatagagcgagcccccagcgttagactgtagtcagcctaacaccggaaacactcgcataatagatattgtataaaagacatgctctaggtaaacataataaattatagatctgacaatactgtatgatctgaataggtatgataaattacatataaaatattgcgtacctttgtagatacatgccggatgtatctatgaaattagtagattaatttaaaaaaccaatctaccaattaacttgtcgcgtactcgttcgacatcatatgatctgacgtcttttggtacgccgcttatcttgaggcctggtcgatctcgagagatcaagttgttgatgatgatggttccgatctcgtcgggagacatactccggtcgggttggatctccccacagcgaagtcgtcgagtagcttgttgtcggagaatctatctcttgaacccatctcgtcgaaatcctgaagcaccaaaatcaccctacctggcgcgccactatcgacgtttgatgtcgcgattctggtatttgcatagtatgaggattgttggtactaagatatacgtgagactgaggtaaaagagatagagacgaggatttttatacaggttcgggcccctgaattatcaggtaataaccctacatcctgttggccgaagccggtcgttgatcttattcatcataatcacaccagtacaatatttggggtagcctatctaactgttgtcgacgtggcggcctgaagatctgactcgtagtcgacaacagggtagccttcctcctcaaatccgcatccagcgagatcagagatagcgctagattcctctctttggttcccgtaggtaccatatcgggttttcctaggcttatctctgatgtcgatatctagcagcttgtcttggcctatgtaggcttgtattggcttgtggctttgtggcgtctatgttgtccgtgtctgttggttgtgtcccctcttcttctagggggccttgtatttatacctatagatgtccctttgtccaagtagaactagggaaaccagtatggatacaatccgagtagtccttgtcatttccatgtagaactctagtcattcttccttatgcggaactcctcctatatccgaaggttgtttccgtataagacatggtatgtggtgggtcctgccgagatttagtcgactactattaggtatgtggtattcataaccctgacaagtataatataagagattttgattttttttacttgcactatttgatcattcgtcttattcaaaaatttttggaattattatttattttatttgtgacttactccctccgtcccataatataagggattttaagtttttgcttgtaacgtttgatcactcgtcttattcaaatttttttaaaattattatttattttatttgtgacttactttattacaactttttgtttttttacatttgcaaaaaaattctgaataagacgagtgttcaaacgttgcaagcaaaaactcaaaatcccttatattgtgggacggagggagtactttattatccaaagtactttaagcacaacttttcgttttttatatttgcataaatttttttaataagatgagtagtcaaacagtacaagtaaaaagtcaaaatcccttatattataggacggagagagtacaataaatacagttataaagacatactatatacattgtagagatattttttatgatattaattgctaacgtagttcttagctatatgggttgcccatctctatatcttctattataaaatttgaaaatgttttcaccaaaattttgatatatcatccgtgtttgaattggttttaatttgatgtttctgttaaattctttctttttttttttcttacgccagagtgtccctctaatccgagaagcgcgataattaattgggcccacaccttttcacatgtcccttgcgcgctgcctcaattgggcccacaacgccctcactcgcgcgattttccgcatgcctgattaggcccacgacgccctcgcacgcgcggtttgcccttgccacatgtccaatcgcgtctcccttgtccacgatttaaaaattaaaaattgaagacgacaaatcgagcttatgcttattcctaaaggcaaattttaaattttagaacttaattttaaattcaactttttggttttttttatcgtaccttattttatatcatttgcttttgagtcgcttagaacatgtttagtcgtcaacacatatatataaaagatttgcatataaatagtcttttatttggtaataagtgtctcggataagcacatgaataaacaaaacaatacgcgatgattatttatccactgacacatatgtacaatttaaattggctcctcccgttgcaaagcacatgcatcttttctagtaagaaaataaaatataatgacttttgagttaattgtgtacaaatgaatatataaaatataaaacggttggtgtgctagggatccgttgaagtagccgttgtctactgggtgctggctctccatgcggcctgttattagctcttgattttatcaggaactggatttatccaacaaaaaaatcatagaccttctaaatcaagactctccaaaccatgtataaatgcctagccacaatctcctccccaaccattccccaataaattttcccaatctcagtttacccaacttcaacccacattttttacacaatttctatccatttggttccccagtcaactatacaccatatggtcattctccttcaagctttcaagctactccatatcaatgaaattgggcacaatctaatctagccagcttacaaggttttcatttgcaagaaaatatggtgcactcaccaaatcaggccacattttgtttagaccactctctttgttgggggttatatggcccagttctttttctcaacttcaaacttcaactttctcatttttcgttaacatgttctaaaactgttaaatgatatgtttttggcaaaaatagtttatgtagaagttgtttacaaaatcaaataaatccaattttatttttagatagttaatagttaattaatcatgtgctaataagttttcttgtttcgcatgctctaaaagtatgagagaaagaacagagcgtaagttagtttatgagtctaaaatatctaaacctaaacaaatagtagtaagtagcttttccatttgacttttttaaatccataagccactcttgttgtattaagtaaaagttatgtttaacttttttaaatccataagttatccttaccgtattaagccaaaagttagttaggtttgagattttttttttgcttatttaaggtaaaggtatagctttacacttaaatttagagcttaaaattcaccgacttataaattatattagctaaaaagctatctttaaattctaaactaagctttgaaaaggccaaagcttcaatttttctcctgaggtggaggagacgagaaagaggaggcactcatgcagtgcagcgaggcaatccatacacactctaagataaaggagatagaaaaaaaatggtaaatcaaacaaaataatattattagtgttagtacatcatatattgtacatgttattttttttgataagtagcatatggataagattaatgatggcaatcatcataaaactaaaattcgctctaagagaaagctgacctggtctatatagatagctagaagtgcttatatatttcataatagagagagtatcattgtatttaaattgcactagttctaagaaattggcacatcagtatgtttgatataatagttttaagagtaaagtgcatggtcggtcccaaaacttgtgcagttgtgttatttagatttctaaactctcaaaatacaatttttttataacttgtcaaattgtgtcattttggtcctaaattgccacagctcatccaagctagatcctatgcgacgttgatgtggcatatcacataggcgttgacatagcatatcacctgtcaatttgttgtaccgtctgtgtaatttactctaaaaagaaaaaaggaggacttttttagtgggcttcaatgggtcggtccgtgtaaaattggtgaatatgccacatcagcgtctatgtggcatgccacgtcagcactatataggatctcagagggaccgtggtaattggagatcagaaaatacactttgacaagttttagaacctgaatatatattttgaaagtttagagacttatatgcataaccgtacaagttcaaggatcgaatgtgtactttactctagttttaaaattgagcatgcccatctgataattcggcaggatgtattaaagtatgacaacttaagtatgtcgatgcgacgacgtagatatgcaaaagtgctttcccggtcaaagaagaaggaggtgccatgcgtgactttttttttaaaaaaaaaaaacgcatcatcagggcacattgataaaggaatcacctcagccgcttggaactttcatgcaattttgttgcaaaattatgtgaatttgatattttcctcttttttaaaatataaaaataggaatgtggaccatttatttgcaagaggtatacatttactatttaacaaagacatacatggaatgaaagattttaaaaaaatactaaaagtttcaaaacacttacatttatgaaaaggaaaatgagaccaaaagaacacgcatttggaatgagtcgagaggatgcaaggattattttggatgggcacaagaatttaaaaagggaatgaaaataagagaaagaagatagaatgcaccatatgccaccatctatcttcaatttgcaccaacccaacaccactcttcctccctggttttctccagtcattttcctcggcaaaagtagtgccacactgcatgctttgttatgcaaatcaacaatcaggcaaaaagtatagcagtagcaatttgagttgagaaaagctagagatgagcctccatatatatataattcaactttcagcacgttgggacactagaggattttctgaatggcagggcaattctcctttggcacggcagtgcgtctcttttttaggcctctcatgccatgccagaggagaatcgcactgtgattctcaccctcatcagtcatcacacagtcactaacacaggcagagcgccagagcatgcatgtatcactttctgcaactaattgtgttcatgctctttgacgccattgttgcattggctgctagctgcttctttctttctttctttctttctttctttctttctttctttctttcatcttcgccttgagttggtactagcttggggagaactctgaaattccagctacctatatatatcctggcatggcaaggaaatcagagaggatgatcaagaaggccaggtttctggatatgccatgatatatgctaccaccaatcaggatcattcttggcctcttgggaagctcctctctctctctctctctctctctctctctctgagcttgcaattgcacaagcatggaaagcaggaaaggtcatgcaaaaaggggacggtgctttccaatattcttcgtttctttcctccaaaaacttttgttgaattgcaactgttagaagttagtagatcttaataagcttggattggaccgttgatcacctgatcggcttacctgaatgtgtgagagggtcttcatcaattaataaattctgctagttgagcctagcaattccatcatgtggtgattcgcatctcatctttgtcgatggaatatggaattggcgacagattgcggcgctgtgccttgtcgctggacattctcaaggatcttcttcttctcctcctgctgctgtgttcagagagctgaatgaattacgggggcgtctgttcatctggtgaagagctactggtactggggcttcgaaaggccgatttaacagcagtgcagccaaataaccttttgagatcatggatgctctcagagtctcagtcgtttttgcttacatgtaattcatgtggtttgttttttctgaaatttagttggccctttcaactgtttttacacagccatgtctctctctagctaacagctatcatgggcattgataagcaactctttctggctatgcacctatacttaaacaattgatttcagtaattgaaagagaaaatataaccattgacaaacatcctattccaagaaatacaatcaatgaacacaattttaagcaatttgtcccagaaatttaagatacacacatcaactcactagcactcatgatcatcaatacaatatatatttatcttctcagtacaacatatattatttagagataattgcacaaccgtttattttaataaaaagaacacgatgacaaatcaaagttagtttgttgctaacgaacagcaacacatctatctatctatctatctatctatcttctattatatactaaaagtccattaaactttctacaaacgctctcaatccgccacgtgtcactcctacaaacactcctagaccgccacatggcactatataatctcaccgtcgattttcacttaaattggtggacccgatattttagaccattggattagatctattatttaagaaagtaatcccttcctctgctgtgggccaaaaaaaaggaaaaaaaacgtacgtacgtacgtgtggcttaaacttcctacatacgctttcaatctgccacgtgtcactcctacaaacactcctaaaccgccacataccactgtataatctcaccgtcgatttttagttaaattggtggacccaataaagtaatcccttcctctgctgtgggccagaaaaagaaaaaaaaacatacgtacgtacgtgtggcttcgtataaccgtgggccggaaaaagaaaaaacataagaacttagtacgctctccctgtctcttcctcttcctattcttttatatctccatctctttctcttcctaattcttttatgttatcaaattaaaaacgagttaagttgaccatttaaaataatttaaatgtacatagctaatttatattctattaaaacgttgctctatttataattaaattgacaattttacatccaatgttttgctatatataagcaatatgttattgtggtatagactgtgcattttgcaagtttgcatgccatctaaataaattaaatacttattaacaacatatattatatatctatctatctatctattattatatactaaaagtccattaaacttcctataaaccctcttaagttgccacgtgagactcctataaacactcataagccatcacgtggcactctaataaattagaaaaaaatatataacttgaactggtgggccaattggatttatctcataaaaaaaattcttcctcaactactacagtacgttctcatctccttcccctcaatcccttctcctcatctctttccttttttctgtatggtagttaagatttttgttttattacttaataattaatttcttcacttctatctaacgagaatggatgtggactcttgattgcatgtcccatgcctaaatatataaatgattaatgatttgatgcatgcttttataaataacaaatctatttttaactaacaatttagaaaaaagataatagttacatagcaaaataatcataattttaaaaagttactccctctatatcatattataagccattttaacttttttcttaattaaatttctttagatttgaccaaatatataaaaaaaattaacaacatctatcacacaaaattgttttgttagatataacgttccatatatatccataatatgttttttttgaaaattttactatattttctataaacttggtcaaacttaaaaattgacttaaaaaagtcaaaatgacttataatataaaacggatgtagtatatctgtttttatttagtttgtttgaacggttgtttcataactagacagctaaataatttaaaatcaatattaccaatatttcactataaaaaataaaatatgttatttgaactgccacctattctttacctgacaacccaaataacatcctatttttaatttatttgaactgtttatttatgttactcatattttactatgtaaaatttaaaatacgtaatttgaacatacaccaacaagcaaacaacactgaaacattgaaaatttgacaatatgtattatgtcatcttaatcattctacataataaaaaatagaaaaatacaaagtcaccatgtatgaccttttagatacatgctaaattaccaagtgtcacattttaaaaattagtaaaatcttatatattaaaagaaaaaaaataaaacatctagctaacggttttcacctagatcgatgacctattaacattattttcaactatctaatctacttttagaaaaatatatcttaataagtggcatgtcacatattttaaaaaaatcttgcaaatcttaggaaaattacatctaataattggctttcacttaatcacttagaaaaattaaaaaaaaaatcccctccacacgcgcccatcactacacagccgctccttcccctctctggctcaagctctaaacttttcattcctcttacgttcctatttaactaaaatataaataatctataattataagtttcacgtctgatttctaatctaactattgctctgtttataatcaaaccaacgatataagatccatatgcctatagtttactatacaacaaatacgacattttaacacaatcagcctattacttacgagtatctcaaatgcagcttacgatacatgcccgcgcgaatgcgcgggctacctttctagttaaatataacaaagatattgtggagattatgggtaccccatacctacatggcatagttatccgactggctataggggataacttatatctatggaatatgtaacagatcatgacttgggtattacgtttccctgtatattatggaacggcctaaagtcctggtttgataagattgtaaagtagatttaggaaaccgataccgtattggttaaggtttctatcttgtaaccctgccccccaacctatataaggagggcagggagcccctctaggggcatgatgagacaacctgatcgtcagatcaatacatactcggcggattcaaatccccaaacaggagtagggtattacctctcattgagagggcctgaacctgtctaaatcctttgtctccacatccatccacttttaggtctcgtgcgctaccccgttttattattgccgaattcatgtttcgacagttggcgcgccaggtagggggtgcgtcgaattacctgtcgaaaagtgcgatggaatcaacttcagaagaaaccccgagatcaatctcatcaatttcgatggctcaaatcttcaatcgggtctaccgttccaatttaatctctattagattaatttttaatcattgtttgatttcctgatattttgacgaatttcatatactggatgagatcgaaacacgaccatcatcgtcgcctacttgggtgcccttgccgtgtccgagtgctcctctcttcctttccttgcagatggacgtgttgcaggagtggcacaggccgccaggattcgattcctgtttgcatgtatgatggttgatgggctccgccggctacctccgatgatggcatcatgccgaaagaacatcgagttagctgttagttgccggggcttatacatgttgcatggcacgtcgccggctatcactcatgatccagcctcactgctcgacttgagtttttcgtttcaatttgttatcaatatatattagattgatttctaatctcagattaatttcttgctattttttgttgttgttcgcatataactacgcggcactattgaggcgattgatgctggtcatggactcgaggcgtctcagctttccggtcgatcggccgcgagtccactccgccggcttgtcctcgccaccgccattgctgatagcaacaacgacttcaccaccggcctgcctccgtcgccgccgactggtgtccccgcctatacggttggttggtcacaccaccgttcatgggcgtctacgacttcaccgccggcctgcctccgtcgccgccgactggtgcttctgcctacacggctggcctattatgccactgctgttgggcgtctacgacttcaccgccggcctgcctccgtcgccgccgactggtgtttctgcctacacagctggcccattatgccaccgctgttgggcgtctacgacttcaccgccggcctgcctccgtcgccgccgactggtgtcctcgcctatacggttggttggtcacaccaccgttcatgggcgtctacgacttcaccgccggcctgcctccatcgccgccgactgatgcctccgcctacacggctggcctattatgccaccgctgttgggcgtctacgacttcaccgccggcctgcctccgtcgccgccgattggtgcctccgcctacacggctggcctattatgccgccgctgttgggcgtctacgacttcaccgccggcctgcctccgtcgccgccgactggtgtcctcgcctatacggttggttggtcacaccaccgttcatgggcgtctacgacttcatcgccggcctgcctccgtcgccgcggactggtgcctccgcctacacggctggcctattatgccgccgttgttggatgtctacgtcctcaccgttggctcaccttcgttgccatcgactggtgtttccgcttacacggctgacctattatgccgccattagtgggcatcttcgctttcaccgtcgaccgccttcgtcgccgccgactggtgtcttcattgttattgatggacgactttgttcccacattggccacttctgccatcaccaaggggaatattacaaagctaagtcatcatttattttattctttatatgatatttttccttttcctctgcctcactacaccaattggtcttccattgagtagtgagtcgggggctacagatgttatatcatatttttcataatatttatcttgattgcttgcgacataatctgagtacaaaagtacctatcgagttatggagttctatcttcctatgctttccgtttggtttgccaatggatggttgcctttgggccgattcctagcacccgggggctcgttggatggaccgagtaacgcaaggtgctaagtattattcggaataaatcaaaagcatagagatgagataaatttattttctgctcttaataattgcaaaagtacccgagtagtaaattctgatccgtgaaactttgttccattaatgacgaactcatgtcactcatatgcatgtttgggaagtgcctaggccgactcccggtgcttgatggtcatgactagtcggacagagtgtttaaacgtacagagtcatctgctcggggaaatcaaaattgacaagaggagaaatacatatttataaatattttaaaatacttgattttttctcgagtattatatttatatcagatactactcatcctatatgtttgttctgcaagatccagatccagatatgcataaaagggattcatggctttaagcttatctcttacgctccaggaatggatcagtcagaacatcaccgaccggcttgccttcgccgccgccgactggtgtttccgcctgcacggctggcctttatgccgccgttgttgggcgtctacgtcttcaccgaccggccgcctcgtccgccgccgactggtgcttccgcctgcacggctggcctattatgccgccgttgttgggcgtctacgtcttcaccgaccggcttgccttcgccaccgccgactggtgtttccgcctgcacggctggcctttatgccgccgttgttgggcgtctacgtcttcaccgactggcttgcctttgccgctgccgactggtgtttccgcctgcacggctggcctttatgccgccattgttgggcgtctacgtcttcaccgaccggcttgccttcgccgccgccgactggtgtttccgcctgcacggctggcctttatgccgccgttgttgggcgtctacgtcttcaccgaccggccgcctcgtccgccgccgactggtgcttccgcctgcacggctggcctattatgccgccgttgttgggcgtctacgtcttcaccgaccggcttgccttcgccgccgccgactggtgtttccgcctgcacggctggcctttatgccgccgttgttgggcgtctacgtcttcaccgaccggccgcctcgtccgccgccgactggtgcttccgcctgcacggctggcctattatgccgccgttgttgggcgtctacgtcgtcaccgaccggccacctcgaccgccgccgactggtgtttccgcctgcacggctggcctattatgctgccgttgttgggcgtctacgtcttcaccggccggccgccgcatccgccactgactgatgtcaccgctagcacggctggcctgttataacgccaactgatgctatcttcttcacggctggctacatcgctgtcactactaataggcatcagtatcttcaacacaagctgcctacgtttgccatggctgccgactggtttcttcacttccatggctgcatgattctgccagtgttgattggcctattatgccgctgttgttgggcatctacatcttcatcgccggtcgtctcgtctgctgctgactagtgcccttacctctacatcttcatcttccgtcgccgactgattatgctgccgccgattggtgcttttatcttcacaactacgcgtcttcactaccggtttgcttctgttgccgccgacttgtgttcacttcattacggcaatacaactttgtcatcatggtggagcgacttcatctttattatcttcggcaccggcaaactctattgctgctacttcgcaagttttactacttcaccaaccacgacgtctttgtgaacctcgacatctcggcatgcaatgccatgatattttactacaacaagtgactctccaatattcaggatttctacttggacaccttcaacacatatcttcaatcaagcaatgactactcgacgacaagaagctataattctcgactctatgttcagttgtttctcaactaaccaaagagtcgggggctacacaaatataaggctcaaaatttgacaaattttatgtcaagctgaagaaatcaattaatcagccaatgagtcaactccaggagtcattatcttcatctttgcttcggaacagacattctacttcaacaacttcaaatatttcggtttagacgagttgggcaacaacatcaactctcctccaattatttgtcttcacggttggcctactacgcaactgccgatagaggatctcatcgttatcatcggctgctacatcgctattgactggatcaccgacatcgtcatcttcatcaacatcttgtcaagcctcatcaacatagccaactctgctgccgttgatgggaaacttcgtcatcatagtcggctatctctgttgccgccaatcatcattaccgtcggatgcgtttgtcgccgccgattattttcttcatcttcatgattggtggatttcgccatcaccgttgatgcgcgtctacgtcttcatcgtcggtttgcttttgtcaccaccgactgttctttcgttgttgttgggcgcctacatcttcactgctagctgacctgactgttgccgactggtttcttcacctccatggttatgcaacttcattacatttgattggtggcatctttactaccactgacatcttccgttacttctgatgagcaatttcgtcttcatgttggtcatttcatctccatgccgactgcgtcagttattgccaatagacaattttgactatgacagaaggacaagctatatgctcaggggctcatcaactcaagcgtgaggattatatctccaatttggacttgttccggatacattccacatggattcatagtcatgagtctattttctatgctcaaagactggaccaattattattccccgtaagggctatcaaccgaatacttgcgccagtcgggattcaattattatatttattttggagtatcccataagggataatcattcagatcagaagctattcatatgagctacacttggtctatattacccggaagatttattacttgggagcatgttacatgcgtcatcctttaaagggtgtcgaaggcatattttttggcctaggcctaatatgtctgcagcccatattttcaggtgtggcctgtcacgttcttttagggacttaggcactttttgcttaggccaaagtgcgcgtgatcaagtgcccaataccttaaaatccttttataccgcagttactcaactttttaggagttggtacaatgcatcttaaaaggtgtcaaacagtaaagctttatatagctggcccgctgacttttttatatataagtcaaggtgttgtttgggtttttaagcaattgattagatacaatatcattgcttttcgccacgtaagtgtgcatttttattgaccaatattatggcttaggctgattatatattgtggtcatttttcaggcggttggtaaatcctttatgagtttatttacttggattttataccacatatgtcatatatttccgggtgtggtgaaaccatgtgtcttttagggacttaagcacatctgttaaagcagtgtgcgcatggcgtatgcccaatactttggaaatttctttattcacaatatataagcttctttatagctgttttgctatgtgaattttcaatgatgtaaccaactttaggttacactcatcatattttacaaagcagtcggtatatcactcggatcatgttattcagggattcacaccgcatatgctacatattaatatcaggtcgcttggttgactataattattaaaaccactcggttggttggattatttattccttgactatatgcttggtttgttcaattaaccacatagtcgggggctacacctattaggtgcatctagtcgatacacctgactttatttttcagccctccacagtcttcgtatttggtaaaagtacttcggagaccatggcgaagatgattgaagcactcagctttggagtaatctagttcgagagaagattatcttttcgactgtgaaggtctcaggggctactgtggagattatgggtaccccatacctacatggcatagttatccgactggctataggggataacttatatctatggaatatgtaacagatcatgacttgggtattacgtttccctgtatattatggaacggcctaaagtcctggtttgataagattgtaaagtagatttaggaaaccgataccgtattggttaaggtttctatcttgtaaccctgccccccaacctatataaggagggcagggagcccctctaggggcatgatgagacaacctgatcgtcagatcaatacatactcggcggattcaaatccccaaacaggagtagggtattacctctcattgagagggcctgaacctgtctaaatcctttgtctccacatccatccacttttaggtctcgtgcgctaccccgttttattattgccgaattcatgtttcgacagatatataggcagcatcgcatcctgagatcgcaagtggcaattcctctttggtgcgaaagaacaatggcatcgcattctgcaaaactgttcacagcacaaatggcagcctacctttctctctctatctatgtgctgtctggactgcaaaatatttttacaaagaaaaaatcagacaagaagagaacaaacgctgggcatcgcatgcagcagcggcctctcgtcgcgtaacacagggtccacgtaggctgtccaggaaagacgcgagatctatctccaaaatcggaataaagctaactcggattcttggcatttcaccctctcttttcttttcccttttttttcttccatggcaatatggcatcgccgcatcggccgtcaaatatcaatacgacgaaaggggaaagggctctcgaattcagctggagaagcagcaaagcattgtgctgccggatatgccgtttccggcagcaaataaatgctgccaccgccgtcgccccttcgctcatcatcacaccaacacgatctcgagcaatcacaatatgtacaatatgtaatactacttgctactactatctgaggcattctgatgaggaaaatggttgagatcgagcctgtggatgtgcattgcagggcaactactccattggcagagggatggattggatatggatatggctgatgcttccatttgatcccatccctatctgccaaaggagatttgcccagcgattcactcctacttgctcatgttttttttttctatgtgggaaccgtgtaagagaaagaatatttaggctctacattatgatttaaaggcaggggctgacccagccttggtcaaggcctaggctagcccattgcactttgggttaagattgaacttacatgatggaattttgtactacgtagtgagatttcaatccaaatcctaggcattgacccgtggcctgggtctgcccctgtccaaaagtatgcatatgcacatgaaagcatcgaggtgatctcaattatatggaatatatatgcacgtacatgcatcactgcacatgcacatacctacgagtacatccttttaacatacaactggagagatgaaagcctgttgatacatccacaatctcagttaagtatccacacatgcataattatgaacatcagaatttagaccttgtgagtgaagtcatgcaccacatctaaggtttttctccattgtaatgattttctagtctggtttctagaatgaaatgccgttataactagcggcggcaatgcgagaaaatctaaaatttatcttgcgactagttaagctaatatgattgaaatgtactcgagctacaataattacaactagcggatattttcgtgtaattttttcgtagagcaagatttcaaaaagttgagttgtattttgagatacaactcttaggtccctcaaatatttggattgcaatcaaaatctataataatataatttgattttgattttgagattattctttgttggtcatatctctttttatgattgctcatacaaataaaattacgagtaaattttataaaactacagtactttgatcgaagtattataaaagtacagatttaaggcgtcgtattataaaactacatatttaacacaaaatttatcacaaaactatagatttaatactagagtatcacaaaactacatattttacagcttaaattcctaccactactgctatgttagagtgataaatgtgtagttttgtacttaacatgatgcaaaacatgaactgttgtgataattttattactaaatttatagtttggtgatcttccaccttaaatatgtagttctttgatgaattcggtcctaaatctgtagttttgtgatacacctttttaaatctatagttttataatagtttgtcaaagtatatgtagttttttgaaatttactcaaaaataccgaataaaatgttcttaccattagaacatttaaaatcccaaaaataatccaaaactcatcaagcgggcacatttgtacgtggtagaatttgggcttttggcccattttgtggttgcatcgaagcattgggccattcttttcgctgtcgttcaaaaggccacttaccacaattgggcccatccagaaacctcttggtcgcagccaccgcctagggttgcgctctctcttttatcccagcgccgccacgccaccttccctcctccctcctcgccgccgacgaactcccggccatctccgccatggtcgcctcctccctccctccttcccgactcatcgctgttcatctcctcaacctaacacccctcttccgcgtgcgtgtggtgagttgtggtgcaggcgtcggagaagaagcagtcgaacccgatgcgggagatcaaggtgcagaagctcgtcctcaacatctccgtcggcgagagcggcgaccgcctaacccgcgcctccaaggtcaccaacccccctccccccaaaattctcccaaccctcctctcgccaacctccatttcaacccccctctctctccggtttcttgcaggtgctggagcagctcagcgggcagaccccggtgttctccaagggtaggttaagctctccgccattgccgtctctctactctagtttactcttagcttcgttgtggtgatgacgagagtttgcggggggcgctttctttgcagcgaggtacaccgtgcggtcgttcggaatcaggcgtaacgagaagatcgcgtgctacgtgacggtgagaggggagaaggcgatgcagctgctggagagcgggctcaaggtcaaggagtacgagctgctcaggaggaacttcagtgacaccggatgcttcggcttcggtatccaggagcacattgatcttggcatcaagtaaaggccccgttactctttctcggatgaaacatttcgcttttcgtatctgcctgtttatgttagtcctgtgcctagaagattttaaagcattcattgtctccattcccttttgtgacctaggatagcgcttccaatatttgcttgaaattgcctcattcaatagatttgttttggattgatgtttacaagtgatagaattttattagttgtaagttgctaaacctgaagatggtttttttaagtgttctcgggtcattgacaattcatttggtacctaggaattgttagcatactgctaatgctatagatgtttatttgattgaggcataaacattgatgcttttgtttaagtggtgttgtgatttctaaagagcattgagctcgattttgaagcagaccatggactagatcttttataatctggtccatttgaaaacttactttataaatagaccttgacaaaacttataaaataattggacctgaatctcggctccaagatcattagcaccaatattcatggtctatttagattgtgcaattacctttgcttggcctagcaagctcaagctagcccatgaaagctatggcataaaaaagcaaaagtacaatgcttggatgtttagcccgacaaattgccatcggatgctaaccgatttggctttttgtcttgggtgagcttttctcggtagttagttggccttactaagcaatactttttttttcttttgctaatactaagcaactctccttgctaggctaggctatgcttttccttgcttgggattcaaacatcctcaatatcttgtcaccaaagatcctagcattgataccatggcacaagtggcacaaaatccacattactagatggtccgcgccaataactttggttctgggctcatatgtttctaacatattaacacacccatccacataatggtacatgaatggtgtagtggtaagatgtctaaacttgccacctagttgagttcgatccttggccagtgcaatttttttagtgatgtcattaaacaattggtatattaatcaacttattatagaatatagctcattatcaactgtcatatgagctcacatatgcattaccaggaatgcgtaacacaacatggcacaatattgatgcacaaaaattgtatctaaaatattttgttggcgatgagctcatatgagattaagaatttaatgggctatcatctataataagttgacgagtgcttaaagtggttaaatgaactcttacgttcctggaaatcatgtgatcaaatcttcatgatgggtgttttttcctgtctagtcttcttttgctggtccattcaaggtgtgcatgccacttaaaaaaaggaaaacaaaaaagattcccacccaatgttcgaactaagcttgctaggaggcaagagcaggcatctcatcaccacaccacacatgtataattgttctaatggtgtgttaatattttaagaagtatataagcccaatgcctgatggaataagccttttgttgttctgttttgtttttagcatcttaggacaacatcctttcagttttgcttttagcatcttaggacagcatcctagcgatcctaggacaacattctttcagttttgcttttagcatcttaggacatcatcctttcagtgcccgtcgatcctcgtcgtagtcgacgtcgccgtaccgaactgcctcccacatgtgccgcacctggagcctcaccctcatgaccgcagctcactcgatgtagttggtcttggtgaaggcaggccaaccaccgccggggctgacttccctgatgacggcctgaatcccgtggtgtccacggtaccggtccggggagggagagacgagccgcctgcaacggccgcgatctccgtcgaccaagccgttgccgccgggagcaccgccgtcatgcgcacccctgccaaggggtccgccaatgcgtccaagcccgtctgggctaccgctgccgcgcgcgctcctgccaggaacgccgccgacgcatccacgcccggctgggctgctgctacggcgcgtgtggggttgcgcggctgcccgttgctccacccgctcacgagctgcctccctcgtcagctcatcagcagggatgtcgtaggcggagacagagctgctggagctattgtcgcgcagagccttgagctctgccgccgccgcttgcgctgcatccgccgctgcttccacttccacccttgccgccaccaattccgccgcaggcagccttgacgccctcgctgccatcgcagcagtctctgctgccgcttgctggcgttcctcggccgcggcgagctcggcctcctgccggagccgcgcgctcgaggcgaccgagcgctaagactgtcctgcgggcatggcatgctattgggggcctgcagtgtgggggaagagtttgcctctgacgagctgctgctcgtcagtgcaggggaagagggatgagcaggaatagccgatgttccagctgccggttgaggacagaggggagctcgtgaaggggatgagcaagagatgtctagactacaggatagagtggctctagtaccaagtcatactatccgggggaggttggatacatatttatagccatagcttgctagctgcgggctagtctaaaggtgaaaggaaaacataaagcataaaagggatgctgtcctaagatgctaaagagcaaaaccgaaaggatgttgtcctaagatgctaaaagtaaaactgaaaggatgctgtcctaagatgctaaaagcaaaacagaacgacaaagaccaaaaaccaacaaggctactaagagcacaaggcttattccatcaatgccaaggttcctggagctgaccatctagtgacgtggatggttcctggagctgaccatctagtgacgtggattgcttacaacgtgtgacaaggtcttggcgccatcatctttgagataatccaagaaatgctattgacaagcgtccaaatccaaaaaatgccattagcaagtgtgagttccaagaaataccatcgtacaaacgattttgtcccaaaatgccatcgccgttagggttctgtctattttgcactgttaagtacactgttcatcctatagcacttaatgtcgcggagttaagtacattgttcatcttatagcacttaatgtcgcggaatggacggaaccctaacgacgataacggcgatggcatttttggacaaagtcgtcgtatatagtgtattgaaattcttcattgaatacccataaaaaatctttagcgaagaattcccttagaccgtagcgcaaaaactgaaattaaatccaactccagaatatctttgatacgaaaggtgttaaaaagaaaacactaaagagacaagcaatcatacaccttcacttgttttgaatttaaactcttaaaagccctgaaggctatctctcataaagaagtacacatccatgggcagaagggacactaaagagattttaagggactactccaaggggctctaaagggacactactttccctaacatccacccctctatttatagtcgaagatgacggaaatcccactacgaaaatgttcaaattgccctctgggtgaaaccctagctcagatgaaatctaggccatccgttgttccttctcaaaggaaataactcggatgtcctccatgttgttgcccgctccagatcccattttccacataaaatatgcatcgaaccactcctcccgcgcaccttgctagctaggcccacctaccagtgagatgagctgaaggctgaagcttctccggcacgagcaatctacggtggggcctgctatccgcgcgtatgctccttggccaatcaccacacgtacttggtcgtcgttgatccacgtctttgccgctcgccgaatacccgttcaccacgcgtctctgggaggcgcgctccacctatgcgaccttatgcgcttgtgcggcgagtatgagacaaccgcatgtcccgtacggctttcgcctccatgccctcgctgcgtcttgcatctagccaggcctcatctgcaactatcgtcttggaccatcacctggaccagcatggttcggcctccctgccaacaaggctgctagccggacgccttaccgcctccgtcttgggtcaacaagcaagagcctaattggcttgacctcctccaagccaagtcgatcagactcatgcacaagtgcatggcattgggccacgtgcacatatgcgcaacccaatcacttgcttgcatgagtacagtacacatacgctgtccaagtgcatgtatcgtctagcattgtacattactcttcgcgaatctcagacacttgcacacttgaccttgtgaatctcgttgcgaagtactactgacacggtgttcgttcatcgggcaccgccttgtactcaaccgtgtcaactggcatcctttactcttctggacctcaactcttccatgagtttagtcccgatctgccgttgacctagagagacctccaaggatcctgacgtcagtcccaccttgtcacatggcctcttgactgcgtcggacctccgttcctccctgagcatagtcccggtcctcgccattgaccaaggttgacttcgatcacctgcacacacacgtaaacaaaacgcccgttgttcgggcatagatatcacaaccttactcgtgttagtcagcacacatttcttgcacttccgacactcgccaattttccatcacaataaatcaaaaccacaatttgtttcacaatctcccccttgatggaaacattggcaacttcaagcaaaattttgaaaatttgattttgctccacaaagcaaataatattgcaagtcaaacttggttatttgaagagattgaaaaatcaagaccaagtgacagataaggatgcaaatgcaagcaagtgcgtgcggtgattggccgaggaggcgttcgcgcgaatcacgggttcaccctggagtgcgtgcgcatgagaagcttcggctcgtttggacatctgagatatttcctttgaggagaaggaacaacggatggcctagatttcatctgagctatgggttttgccccaagggcaattttgacattatcttagggggatttcatccatcttgggctataaatagagaggtggatgttagggtgagtaggctccctttggagccctttggagtagtcccttagagtcactttgccggcccatttgcccatgggtgtgtacctctttatgagagatgtccttttgggcttttgaagtttaaattcaaaaccacaagtgaaggtgtatggttgcttgtctttgagtgttttttttgtgacaacagtgcaattaacattgttaagaatccggttcaacattcaaggaccaagcacattgagatacggtaccactttctccgaaaatatgtttagaaatgtaccattgtgttaacgccaaaatttaccaaaatttggtaagattctttagtggatttggttaaggaaagaagtcaagcagccgatgtaattttatctagaagagatcgagtttaggaaggaatcgtgaagaccatggcataacagtttaattctatctaataattaggtagtttttagtaattttccttaagttttgtctagtgtctgatcaagacttctatctttctttttatctttaggaaacttgtaacgtgtccgattaggactcgtatcagcccgagggtataaatatgtacacttggggtcattgccatttatctctggatcaatattggcgcataacaccctcttttccgaggtttttgttacctgcagaacttggcacctaacgcggggctgcatgtctttgatcttcggtgaaggggtaacccctaagttctgccggccctggtagttgtattggttatattggtgttgttcaaggctccatcgctttgacctcttggattgctctggttcggttggtatattttacctacctgatatttgaattgtatttttaattgcattgtgtttagagacgcatcaatttagttaggactatcttggttaggtctgatcttgtcttagccgacatatctctacaatcacaatgctattttaaatagatttgttatatccatcgcattagaaagttttatcgactcattgagatcagattattaaacgcaatctcgtgctgcatcggttaggtccgacctcaattgttattaataatcaaagtcttgttaagccgataggttcgtgctaatgtttcatcggggggtttatttgatgtgttaaatttctctttgatgattttactgtcttagtcaaatttaatacatgatcactttgattggtgtcatattggcttgcttaaatctatcaggtaattatcaaccttatgctacatccagttgtgttcgccctgtagggttgtggttgtaagttagatttatttaagttagtaaacatgaatcaatgtttcattggggtttcagtcgataagttatttaaatgttgcatcggcttataaggattatatacaagttggttttagccaattgcagcaaggttttattgattgcctaatcttttggatttaaattctaatgacatcagattcccagccgatgtatgctttaaccatcagattaatatttattctatcatatcattgttggctaattggtttattggatatttatttcattatattatcatcagtcgattgtctttatatcattatttatctaagtgtcagaatctatatcggacatatagccgatgtgttcaaaatcctatcaacatcgtctggtatcgccatatcgccttattggtcgatcgactatgtgatcatcaatttatctatcctgtcagtcgcaatatcaaactgactggcacgcccgcattcgaatccaaatttttggacctgcactgaagctaagcagatctcccggcagctaagcagatctcccggcattgtgtttgtcgacatagttcgcatcaacacagatttggcaccattagctgggcgtggatttttcgtcaacacattgtgctagagtttgttaaatccgagaaacgacatgctgatatttttacaaaacctctctattgagcatgatgtgagttcttgcaaagtgagttaggggtgatccacccctgtggattgcgttgagagggagttcttttcttttgcatgcatttgtaacatttgcatcatgtttactttcttgcattgtattatacatcttttcattaaagagctttgttaacaatttactggacatctttttgatactcatctcttacttttatgcaagctagatcttttgtctaggttacacgtgcttaagtagcttgtatgttcatgctatgctcttcatgcgcattgatacttgcttaaattgaatctacacttgaacttaattaatgtgcacaacttgctctagaagtttgcttttgatgcaatatccttctcatagatatgccatgtttttatcatcttagcaatagctttcggcacatccttttgaatgctcacgcttgattgttcatgggtgcatcaattatgttctttctatgctttatgtgttttaccactgcttttgtcccaggctactgagtgtgtttacgcataagtagtgctgaagatagcactgagactacctgtaacaggagctctaactggaaaacttgtttgagatttgatgacactgtttggcgccctcatcactcgctgactgataagattaggcgtaccatcgcgattgtgctatagttttcttcaaaaatccgaaaaggaataaaatgcaaatgtgatagagctaaaagcccatgttctatgttttattaccatcttgatactctcttgaactgggcattagcatggtatcatgggttcatttttgtttttgataatgttaatcttgcatatttatgcgttggattgcttactcttaagcttcttctagaaatagcatgaaagcttgctagtgatataaccttgttgctcttgtcatgtttcatacttcttttgtatatgtctagctggtaacctccaaagttcactcaaattaaagtttgcaatgtctcattttttgcatttttgcatgtcatcattgccaaagggggagaaatattcagcaaaatgcactcattgagaatttaaaattttgctttagatcttggtgaaaaggggagttaggcacatagggggagcattcttgcatttgcatcatacattactcttcgcgaatcccgacacctgcacacttgaccttgtgaagcccgttgcgaagtcctcccaacattgtgtccgttcatcgtgcaccgcattgtattcaagcttgtcaaccggcatccctgatcgttctggacctcaactcctccctgagtttagtctcgatccgtcgttgaccccggttgacctctaaggatcctgacgtcaatcccaccttatcacatggcctcttgacctcaccggactgctcctccctgagcatagttctggtccttgccattgaccaagattgaattcgatcacatgcacacacgtaacaaaactaccgtttttcgggcacaaatatcacatcctgacctatgttagtcaacacacacattttcttcacttttgacactctccattttcccatcacaatgaatcaaaaccacactttgtttcacagttgggggtctatttataaaataagttttgtaaaagagccacattgtcaaaaatctagaaggtctggaaccacgaaacagtacaaacttcgtatttctatggtagaaacatcaccctattagtaaatgtactgtgagttagaactctagaacctctgggaagctcttctcaccatcagtgcaattttgtcatttgtctattttgtttactaattgagcagttcacttggcattcagcatcagagcatgtttactcatgatgattgttttttatacttgcagaaaaaaactatctaattgaattgtcaatttatcccttgtttcacctttggatacttgttagtactgtctttttacggacccaattacctctatccatcatggacgtattaacaactgtttagtgactggaaatgcttggttatttgaatcatagaaatgcctaccaaattagcaagtttcatactaacaaatgatctgagcaaccctttggaacttcttcacaatccaatttagaaatgatctacacgctcaccatctttgatcttgaccgtccacgaagtttgtccacatatgcaccataatagtttcgtatgtgtagtttgcattgctcttgagctgtgcatagctgatgatggagagaatgcaccaatacgatgtttggtattcgccaaaagcacattgaaataagtgtgtttttgtttttaatttataattttctgcacacatcacatggttttactatccttcgaaaaaatacggctaaaccgtctcttgtgtgctgcaggtacgacccctcaacaggtatctatggaatggacttctatgttgtgcttgagcgtgctggctaccgtgttgcccgtcgtcggaggtgcaagtctcgcgttgggatccagcaccgggtgaccaaggaggatgccatgaagtggttccaggtcaagtatgaaggagtcatcctcaacaaggcccaggcgaatacctcttaaaacattttcacctgtaggctcagctgttagaaaagcttttcccttgttgggcagaagttcaccttccaagttttatgttacttgatgaattttccggccagatgtttttgtcaattacctgaaagctaagagcatgatctgatcttacatcatcttgtccaatgtcacacttgtgcttttgcatggaaacatgtagctacctctgaatctgatcacctacttacaattgcaagttcaggaaggtagtcccttctagattagatattttcaagagattggcgttttttttttcaaatactaccattctttttccctactgctctagctggcctgtcgaaatcattcgtgacctgagttatcgttgaaagcttgatgccgtccgacagagacgtcgagctgcctctttttttctttttttttatgataatccaatggttttacatcgctctctgttaattttatgttttaatttcaagcggagtagcacagctcaaaagcttgtgttctgcgcggtggcgagacggagttgttttctggccggtcaccggctgcaagagattggcgttttctgatataccgcttttgtctcctgcttccagttggtcagtcgaaatgcttgatgcatccgacagagacatcgagctgtgtctcaagaatgaatcgggccccttttcctcttcttcccatgcggtttataaaataaatgctcgtggtccaagcgatgaaaaatgattttaaggtgatcctcactagttttaaaacatatgctctgatcatttaagaaaaatgaacaaagcaaaaaaagtaataattcacaaataaaacataaatatttgtgttattacggtttaaaagccaacgataaaaaaacagacttaaaaaaaaccctaaaattaaatctaattatgttcacaaaatttaaactttgagagaccaaggacctatttagtagggctctcaaactcataaatctaatttcaagttatggattggcccaaaccccacttcacctctttattcattttttgatcatcacaaccagctccactttctttccactgggactgaaaacgtttggttgggtctgccctgagactaaaaaaaaaaactctataatgttttttttaaaaaaagccttgaaatttagctgtgggcttaacaggaaaatttggctagttatctttcatcaattaccatcacctactagctgaataattaggagtatttttttttaaaaaaaataccacatcatgttctggttttgggggcattcttaactcaaaatcccaagttttataatttgcttcatgcaatcttacgttttagggcaaaatatttcttataacctttaggtccaagcctaaatcatccactttggctaatatttttcttttaaaactgtaaacaattgtatgagatattttgtcttcctccgtttcataatgtaagactttctagcattgcccatatacatatagatattaatgaatatgagcaatgctagaaagtcttacattgtgaaacggagggagtatataatataaatgtcagttgctttgcaactagcgttgatcatcgatggtttgataatttatgtgtatatttagcttattctcatgtcatgaattacgttaagttttttaataccacagtgcagaattgaggaaaagaagataaaatacacgagagggatgcatattttgagtcaactagtatgaatttatgtaaaaaataatcatatagtacctctattttttaatagatgacacggttaactttagaataatgtttgaccattcatcatcgggctaattcgatccatgccaccgcaactttgccaaattaaaaaaatactactactattcatcgtatcggctgggcgccactgcaattttgggaaattggatccataccactccgtcgcgttttccatccactcccgttgacgccgtctttccccgtccgaggactgagccagaggacaccaccactgactccggcttcggcgacgacaccgacgcaggcgcaagcggcggcggcggcggcggcggcttagggttctcgtggtggcgcaggcgcgagtgaaggccggaatcccgtgcggagcagcccccatgccatgacggcggttgaggacaccgcagggagcgatgcggctgctcctcgtcgcctcgccggtcgttcgctgcgaaaaggacctcgtcgtgcgcgtccttggccagggacgctgacgctgctggccggagacggtggcgcagccgcggcccactctgccgccttctccttggatgcctcggcttcctcaccacatgccccgacagcacgatggtcgccgagtcgacccgtgaggtggctttcgttgtcagcgtcgtcaacggcaaggccgacctgggtggcggcgaaggagctcggcggtggcgaaggagctcggtggcggtggcgagggagctcggcaccggagaccgcgccggagagaccccaccagggccggccgtgaccgcgccagcttgtcttccgctcgtgccggccgtcgcgcggtgtggaggggatgaggatgagacggtgtgagagatgagatggaaaaagtgacgggagtggcatggatccaattttctaaaattacagtggcacccagccgatatgatgaatagtagtggctttttttaatttggtaaagttgcagtggcatcgatccaattaacccatcatcttattagattaaaaaaataatgtaaatatgataaattataagtcatacttaaagttttttaattataaaatatgttgcaacaaaaaaaatgacatttatataatttttcagtaagacaattagtcaaacgttatgctaaaaatcaacggcgtaatttgttaagaaatgaagggagtataatagtaaaatatgaggttttttttgaaaagtataaggctttttgaaatattttatcttaaaatcggaggttccttaaaaataaatcacaataattgaggttctttctggttatggatgcctcattacgtgtagccaccaaacccaaagatcgagcaggtaggtgacccgttcgacgcagtgggagcggagctgagcaaagctccggccgcgacctcgagcaagacgacgatggagccaagccgcccgcgcctccctctcctcctcctcctcctcctccacttctcgctgctcgcctcgccgtgttccgcgcggtggcgagacggctgcggcgttggcgatctgcgcgagagcttcctccggtgcgtcgcgcggcggtcgccggcgaccgccgccgacccgtcgcggctcgtgcacgcgccgggcgacgcctcctacccgtcgctgctcgactccaccatccagaacctccgcttcgcctcgccgcggacgccccgcccggcgctggtgctcacgcccgtgaccgccgacgaggtgcgcgcctgcgtcgtctgctgccgcgcccacggcctcaccgtccgcgcgcgcagcggcgggcacgactacgagggcctctcgtaccgctcgctcggccggtccccgaggttcgccgtcgtcgacgtcgcggcgctccgggcggtgcgggtggacgcggcgaggggcgtggcgcgcgccgaggcgggggccacgctcggggagctctactacgcggtggcggaggggagcggcgggcggctcgggttccccgccggaatctgcccgacggtctgcgtcggcgggcacctcagcggcggcgggttcggcccgatgatgcgcaagtacggcctcgccgccgacaacgtggtggacgcggaggtggtggacgccgaggggaggctcctggacagggcggccatgggggagggcctcttctgggcgatcaggggcggcggcggcggcagcgtcggcatcgtcgtctcctggaccgtcaacctcgtccccgtcccggccgtcgtctccgccttcaccgtccaccgcctcctactccggcgaggtggccacgacgagcaatctctcctccgcctcctcaccaaatggcaagccgtggcgcacgctctccccgacaacctgttcgtcaaaatgtccatggaggccaagaccatcaacgacggcgacgactcaactcgtcatccattggtgacgttcaaatcattgtttcttggaaattgcagcgacatgatcacccaaatcgaccaccatttgcccgaactcggcatcaaaccaaccgattgcagggagatgaactggctgcaatccatgctgtactcctacggctacaccaatggccaaccagcagaggtgcttcttgacaggacactgcaacccaaggactactacaagatcaagctcgactacctaacctcaccaattccgacacccggcctgatcgaattgctcaccaagatcgtcgaagacgaagacggctccatcgacattgacccacaaggcggcgagatgagccggataccggaatccggcacgccgtacgctcaccggagcggatacctctacaacctgcaatactttgtcaagtggggaggtgacaagaatgtgtcctatgaggatgatcatctgagctgggtgagggggttgcatgagctgatgacaccctatgtgagcaagaaccccagggctgcatacatcaactacagggacctggatttggggcagaatgtggagggaaacacaagctatgaggaggccagggtgtggggggagaagtacttcaggggaaacttcaggaggctggcaatggtgaagggtgaggtggatcctgatcagctgttctggagtgagcagagcatccctcctctggttgtgagcacaagggatgctggattggtttcagatagctgatgatggttcagtctgcagcttgatgtatagtaagaatctgtgccttttcttcagcatatatttctccaataatgtgtgctagaaaatcaaatactcctagttcatcgaatagacaaatctttttttttatcccgagtacaatttggatgcacagatgcactcaagcgtgcacaccaagatcacgtgcgccaacaccaacgagggtgtgtcctatagcacatgtttttgaaaaatggagacttgtaacctcatgtaggctgcgttctttgccgggagttcccaactcccccacattcgttttccatgcgcacgcttttcaaactactaaacgatgtgtttttttttttgcaaaaagtttctatacgaaagttgcttgaaaaaaatcatattgatcgatttttgaaaaaaaattaactaatacttaattaatcacacgttaatgcgaacatcgttttgcgtgccgggtccaacccctcctccgaacccagccttaggctattcacggtacagtgaggtggtgttaggtacgtcacgatggagattcttctccacgtacgaagatgataggtccgtttgacacagctccagagctcagccaaataatttcagctccacttaaaatgggtacagagctgactagagcactatcataaaataaactagagatgtggagctgggtttgggcttgtcggaggacgaactcctcgagcgggggaccgtgaggcccctcctttgttggttcggccgagggcagcgagtgaaagctaaggagctgggaagattggaagctgtcaaggggatcgggcccctcaaaaaggatgagacaaagggaattataccggttcaggccgctaaaaagtgtaataccctactcctgtgtatgatgatttttctgagctttccaaatctctgaacctctggtgtacaaactagggctaagcgatccaactctttgttcttcgaccccccctcttcactggacatgaacctccttttatactccaaggggttctctcacatgcgcgggggtgtgccgcccagtgaagggagtaaatattccctatattaaatatgtgtcttgcaccacaacgtggaagtcctcttagtatcggctgttgtgcggggcccatcaaatcatgtcggctgacgcaggccgacacgggaaggatccccctcattcaccatttaatggaagtggattttgggtgtgcgaatgcaccaggaacaccatccctggtgtgtaactctggttgtctttccttatccggaactctatccatatccgaaggttatttccgtataagacatggtatgtggtgggtcctgccgagatttagtcaactactattaggtatgtggtatccataaccctgacagactttgtaaatcattgctgggaattatatttctagtaatgtcgttaagaaataccaacacattctttaaaccaaaaggcatagttgtataacaaaatgtgcctacaggagtaatgaaagcagttttttcctcatccttcctagccatgcagatttaatggtaacctgaataagcatctaggaaacacaaaaagtcgcaccccacggtggagtcaactatctgatctatgcgtggcaaagggaagggatccttagggcatgccttgttaaggtcggtgtagtcgatgcacatccagagcttgccgttcgccttggggatgaacaccaggtttgccaaccactccaaatggatgacctctcggatgaactcggcctctaggagatgcgccacctcctcgcggataaaagcttgtcgctccggggcctaccgccgcaccttctgtcggacgggtctcgcgtccggccgcacggctagatggtgctcgatcactgttaacagtgaaatttggtaagcccggagtagtcatcggcttcgaagtcctgagattagccgatgagagttgtcaagtcgtcagttgtcggattcttgctatattcggttaaggaaattgatctactaaaggaagcttatccagaagagaccgagttcaaagagaatgcggcatgacaagttatctattaattaggaatagtttgttagtttccttttatctataggaaagtgtgtttagtgtcctataaggactttatcttttacttttatctttaggaaagtttctttcttgtccgacaaggacttgtatcaacccatgggtataaatatgtacacccggggtctatgtaatctatctctacgatcaatacaattcggcgcatcgccatcttttaccttttctactttattttattgtccggcgggacatggcgcttgacgcggggctgcatcggtgttcgatcatcagctaaggggtaagtccaatgttccgtcggcccaggcaattgtctcatctacatcggcgtcgttcaaggctgcatcagcacattcgacctcttggattgctctggtttggatgatatatttgcctacctatttatcatatgtctctgttaatctagtcttagcatatcaatttacctctatcggcttctcgctttagggtttctgccggtatcggctaaatcgtgttgttagattagattagcttagacatctaccaccctaaaaactcagtcaatggcttgattgtctagatattatgtttcttttcatacttagtgctgcatcagttaagtttgatctactaagtcatgcttagaaccataatctctagcctgcttcttgattgtcaataagggtttcatcggggtttcagccgatgagttatctggacgttgcatcggttcataaggattgcacatacatataagttggatttagccgatgacaacaaaggtttcactgtttaatctaatcttgtggatttcatgacatcggacctccagccgatgtgtgctttaaccttcggatccatgcttatttatcatatcattgctagccgattggtttatactggattatattgttattttattacatcatcatcagccgattgcatttatattattatttacattggacatataaccgattgcttaaaccctatcgctatcggctggtatcggcatcggctattatcgctatcggctggaactactccatcggcttgtcagccgatcggctgttttgatctactatttgtatatcttgtcagttgcaggatcaaactgactggcacgctcgcatctcaccaatctttggacctgcactggagttaagcagatctcccaggccggtgtgttcgattttttcgtcaacaatcacctccctgtggaccccaggcatgtccaacggctttcaggcaaagacgtcggcgtttgcccgcaggaaggagacgagcgcgtcttcctatttgtcgtccaagttaccaccaatcttcggtcttggacggatcattgccaaggataatcttcttgacggacacctcgtcaccagaagtcatccgcttcttcaagagacgagaggtggaagtctcaggccccccgccgccgttctccggctgcgaggttgattgcacgttgcttcgtgcaagtcagggcgatcttgacatcgccactaatggtgatggggccgccggggctcagcatcttcatctggaggtaggcgtaatgggtgaccgccatgaacttcaccaatgcgggcctgccaaggaccgcgttgtagggcagattgagatccgccacatcaaagtcgagccgttcggtgcggaagttggtaggatcaccaaaggtgaccaggagcacaatatgaccggacggccacgtgtgtcccggggtcactcctatgatgggtagcgacgtcttaagcttcatccctggggccttgatggcgtcgaaggccgcgggggagatgatgtttagtgcgaccccgccgttgattaggacgcgcttcatcttaacgttgcagatggtttgcgataccaccagcgccaactgccctccccgggaaaccactggcgggtggtcggtttggtcgaaggtgagcttcacctccgaccagcgtgctcgccgtgtcgcctcatgggtagggacagcggccagaagctcgcgcttcatggccttaaagctacggtcggatgcgtgggcgcatgctccacagtcgacggtggcgatagtggtgtcaagctcctagaactccaggtcctcatcaccattgtcgacgggggccttcttcttggcctcctctcgccgcttgtcggccgaggtctccggggctttaccctcccggtgaccctgccgcttctcctgatgcgacttcttgacgcgcttggccaaggacttgatcgtgcgacagtcagcaaggctgtgggtggaggtattgtggatgatgcaccacttatctagtgagcggctctcacaaggggcggcggtgtccttctgtttgatgctcgcggccttttctttgtgcgggggccgcaaggtgccttcggcggtgaggacgtggtccttgtcgccggatcggaccgatctcttcttcttcctcttctctcgccgcttggagcaggaggaggactcaggggcagccgcagccgccgcgccagagctggaggagttccaagcccacgcctcctctttgcgggccacgtgatccgcgagctgaaaaagctccgcgtatgttttgtgctccttggaggcgaccttcttcagcacgcggttatgccacacgcccccctaaatgcgtagatgaccgcgtgaggagggatgcatgggatcgatggtgttgcggacctgacagaactgctagatgtatgagtggagggactcatcgtccttccgttgtaccgcacgctgttaacgacgaaatttggtaagcccaaagtcatcatcggcttagagtcagtatcggcttcagagttatggaatcagccgatgggagtcgtcaaatcaccagcaaccgtgttctcgatggagttggatcaactaaagggaatttatccagaagagtccgagttcaagaaggatgcggcatggcagtttatctattaattatgaatagtttgttagtttccttttatctttagaaagtgtgtttagtgtccgataaggattttatcttttccttttatctttagtttctttcctgtccgacaaggactagtatctccctatgggtataaatatgtacaccctgggtcattgtaatctatcaatctatcgatcaatacaactactctcggcgcatcgccaccctctttaccgaggtttttacttatcattcgatggaacttggcacctgacgcggggctgcatcggctttcgatcttcagcgaaggggtaagtcctacgttccgtcggcccaggcaattgtctcatctacatcagcgttgttcaaggctgcatcagtacattcgacctcttggattgctccggtttggatgatatatttgtctacctatttatcatatgtctctgttaatctagtcttagcatatcagtttacctctatcggccgcttctcgctttagggtttctgccggtatcggctaaatcgtgttgctagattagattagcttagacatttaccaccctaaaaatcagtcaacggcttgattgtctagatattatgtttcttttcatacttagtactgcatcagttgagtttgatctactaagtcatgtttagaaccataatctctagcctgcttcttgattgccaataagggtttcatcggggtttcagccgatgagttatctggacgttgcatgggcttacaaggactgcatatacatataagttggacttagccgatcacaacaaaggttttactgtttatctaatattgtggattttataacattggacctccagccgatgtatgctttaaccttcggatcagtgtttattctatcatctcattgctagccgattggtttatactgtattatattattgttatactatattatcatcagtcgattgcctttatatcattatttaagtcaagtgtcagactctacattggacataaagccgatagcttagaaccctatcgttatcggctggcatcggctatcggctggtatcggcatcggctggaactactccatcggcttgtcagccgatcagccgtttgatctactgtttatatatcttgtcagttgcagggtcaaactgactggcacacccgcatctcatcaagatttttggacctgcactggagttaagcagatctcccaggcctcgtgtttttcgcatcaacacgcttttggcacgcccggtgggaccatgattttatatccacatgtttgaagaagaagtcaatgccaagatcatggtcatagtggaggatttaacggaggaacaaaggcaacagatggagcagtttgtagctgattttcaaacgcgttgtcttcaatgtttcatcatgacaccagaagagccaactcagaagactcgattccccaagccgatagttgaaatacttcaagatatagttgatgaagcagttcatcgcacattgtttgatcagtttggagttttgatgagtagactacaagatgtggtcaagaagatagttcctgaaataattgttcaaaagaatcagctcgaggggcaagcatatcaatatcggccagaagaacttcgtcaatatgggcatgatgaagaatatcaatatgacaatgatttgcccgatagaattgcaaagataatagaggagaagtttggaatcaaacctaaggaacatacttctgtgtatcggctgccatatcctgagtggtttaatagggtgccattgccacaccgatacaaagttccagatttctcccagtttttagggcaagatgatacatctacaatggaacacatcagtcaattcttagcacaatgtggggaggcatcggctgaagaagctctgaaagttagatttttttccattgtctttgactggatcagctttcacatggttttcatcgctaccatcagattttatccaaggatgggccgatcttgagaagcaatttcatgactatttctttgttggaatcaaagagttgaagctttcagatttaatatcggttgagcagcaagaaggagaatcggctatggaatatattcagagattttgtaatgtccgcggtcgatgttatagtttgaatctaagtgatgagcagctcgcagatcttgcattccaaggattgtcagcacctatcagagagagattcttctgccacgagtttgacagtctagctcatttaatgcagacagtatcggcttatgaaagccgattgcaagaagcaagggaagatcaattttggagttaacaagatcagacagaagagaattttggagcatgggtcctcacactccaaaactggggggcatgtgttaacgacaaaatttggtaagcccaaagtcatcatcggcttagagtcagtatcggcttcagagttatggaatcagccgatgggagtcgtcaaatcaccaccaaccgtgttctcgatggagtcggatcaactaaagggaatttatccagaagagtccgagttcaagaaggatgcggcatgacagtttatctactaattaggaatagtttgttagtttccttttatctttagaaaagggtgtttagtgtctgataaggactttatcttttccttttatctttagtttctttcctgtccgacaaggactagtatctccctatgggtataaatatatacaccctgggtcattgtaatctatcaatctatcgatcaatacaactactctcggcgcattgccaccctctttactctcggcgcacgggcggctcaatgcacatccagccagcgctcgatgtcaagccgagcgtccggttctccgtagatacactcatggcgcccacagctccctgcgggcatcgacgaggggtgtgaggacgagtggcgggaagctgccgccacccggtgtgctctccatcttgacgacaaagagagggcaatcgtactacgtgatataccagccgccgttgtccggccgccagcggcaagctgccgctgtgcggtggtgaccaggttggccacatcgtccagccagcaccggaccgaggtctctggctctggatcgacaaggggtggcgcagaagtgcgccctgaggcgtgccaccgtcgtcgtgaggcggcagcgcactctttctcagcgtcctcccttgcctgccagcagtgagatggccgagtccccagacttatcccggccctcccctcgcctaggattgcggcgagggggagtcgaagtaggtcgtgcttggtgacgagggtcaagatcctcctcatcagccacacaccaccagcttgccgtccatgactcccgccatggatgtaccggacaaaacttggggcgcacgaagatgagtgctcctcaggtgaacacgaacgcgccccctacctagcgcgccagctgttggaggatgaactcctcgagtaggggaccgtgaggcccctcctttgttgtttcggctgggggcagcgagtgaaagctaagcagctaggaagattggaagctatcaagggggtcgggtccctcaaagaggatgagacaaagataattatacaggttcgggccactaacaagcgtaataccctactcatgtgtatgatggtttttctgagctttccaagtctctgaatctctggtgtacaaactagggctaaacgatccaactctttgttcttcgatccccctcttcattggatatgaacctccttttatactcccaggggaactcacatgcaccgggtgtgccgcccagtgaagggagtaaatattccctatattaaatgtgtgtcttgcgccacaacgtggaagtcctctgagtatcggctgtcgtgcggggcccatcaaatcatgccggtcgatgcaggctgacacggggaggattttgggtgcgaatgtgccaggaacgccgtcccgggtgtgtccaggtcggtcaagccggctctgaatggttgcaagtcactgtgcccctcatcattttgacgggataaggcatacctaccgcaccgcacgctgtctgacacacggccagggcgcgcgtggcttgccgccatctcgtctgtcactcaaccggtcatgcaccggtcacgattcggtcaagcgtgcagcacgccacattaaatgaggcgtggcacgtccgctccgtctgcactacccttgcatgatggccgcgtggtgaccgtcccaaggggtaggggcggagaggggcggctaccgctcatccatgggcccaacccctcgggggaagtgccacgtggacgtcgagggcgacctctcccctttaagcacgatatccccgggcccatatcatcgacagtagcccccggccgaaccaacaaaggaggtgcctcacggtcccccgctcgaggagttcatcctccgacagggctactccacaactctactccaaacccaactctggagctacatttaggagttggagctctaccaaacaggcccaatgtgtctcttgtgagcccctcgtcctcctgttaggatccaattaggaagggagcccgcacattcgcgtgggcattcatgaatcattgcttaaatatttgatatatcttactattaaattgttagtttataatatgtaatatttacttcatctatataatcacctatctataaagttaagcttcttcatcatttaagaagacgaagaagcttaactttataggtaggtgattatatagatgaattaaatattacatattataaactaacaatttaatagtaagatatatcaaatatttaagcaatgattgtagagagcatgacccatctattcttctcctgcacatttgcacaacaatgctggcagcaaataggcattcagtgaaatctagcgctggagctcatgaacatgattacaacagctaagtatcttttcatctcaacttcttctttgaagctcaggcgattggttgttggcacatctggtgtagaaggaatgattttattttcaacaatgtgactatcagtttagtcaagtggaaatcagagttcaagaaggattttgctctgcatatgcacagagtaaaaaagcagacaaacccatcctgcaatcatggattgattctctctctcttaattgttttgtatttttgtaaatattgtaaaccttttatttattattaatatagcgcagtaggagcctctcctgctcctgctgtttcacgtaaaaaaaatcatttaagaagacgtaaatctttaggtttaaattttaagtctaaattaaaaagtaaggtattgtttttctttttaattgaatgttttgggctcttatttttaacaaatctaaataaaggttactgctaatagatgtgttttattccttgttttaattggttcacatctaacgcaatttgttatacgtacttacctatcaatcaataaaaatagagtagatatattctagacctcgctgcctataatatgtgtgatctatatttttcttaaatacatttagtcaacccgaatgttaaaactcaaatttaatagtaagaaatataatattaaaaccaactatctactgctatagcatagaattccctagcatagaatagagggaagtctattcatacgtagtcacttaaaaacgcagtggttctttccgtaaaagatctaaccagtaaaacaaattatatataacaagggctgaaatgaaaaaattatgttggcccaatgaagagacggcgcaccgtaggcaactagagatacgtggttatacttaagcctggtttagttgaggaaaatttttagatttgattgttatattagatatattagacatatatttgaagtattaaacgtagtatagtaacaaaataaattatagattccgccaggaaactgcgagacgaatttattaagcctaattaatccgtcattagcaccacattgttaaatcgtggcgcaattaggcttaaaagattcgtctcgcaatttcctagcgaactgtgtaattggtttttttctacatataatattctatgcatgtgtccaaatattcgattgtgacagtgtaaaaaattatgtttgggaactacttagatgtttacttgacaaaaacataaaattaaaaccgaaacataaaactaaaaccgattcaaacacaggctatgtttagttacaaaatttttcttccaacttccaaattttccattacatcaaaggtttcctacacagacaaacttccaacttttcctatcacatcgttccaattttaaccaaacttttaattttggcgtgaagtaaacgcagccacatatgactagcggaaacatcttcaatttttataattgtagagatttagtctaacttaaaaaactttaattagaaaaaaatttaaaaagactttttatgtgaataaaactaagggagtacttgctctgtggcggtggcaccgtacgaggtacccaactttttcttccacggaacataagaaaacagcgtacatatcatgcgtatggtacacacgcacacatctttttgaggtgaatttttttttgaggtggacaaatgcacacatctgccgagcctgcaattagcgtacggtacacaagccattaaggcaaggtttccgggcaagctagtaccgcgatgaaaaacacaagcgattaggccaatgtttccgggcaagcagaggccgtggcttgcagtactagtgccagtgggtgcaaggtgatcaatcgatcctaggctcaatactctgaacggtagtctagctgccacggctgcagctagagtcgtcatccgaaaatctgaaaagaacggaccctgaatcaattccaccggcaatcgaccggcaaatgatcactatcgttgagtttaattacaaacgtcggggaatagcagtgaacgtaaccttcctatacggtttacaagagtatttatagaagataaaagaaaaaataactaacaggaaaaggcatcaagtcctactcgaaaattaatctgaatatagtgtagacctaaattcggatcacatatttaacaatcgctaccttgagacgaattttctcttatagcataaaaattatcaatcaccaaaatacctcatgtaggcaaaatcaccatgcgccaaatagtatgtagaattaaagtattagaaaagttttggatggattaatttgaacaaaatcatagcgaaatgattaatcacaagttaatgccaaaaaccgaacaatctctatctccactattataaaaattaaagatgtttttgctggtactttgtttggttgtttgtttgtttgccggtattataaaaatctctatcccatgtatttttgtttgtttgtttttacactaaaatgcgacataagcgacatgttaatgacacgtgggatgaagaccgggtcaacactcccacgtaggcgccacgtcagccaaaaccgcttccaataccactaagaaatatattttgcattggttttgatagttggaggagtcgatatacccggttttttgtttggaggttttaagtcatacttggaccatagttgagggagtcgaagtatactttttccacaagtctgttccctcgctcatctctttgggccatcttatatttctagaataagtctattctgcatccctattctcttttatcatgccctgaattaagtctgttttgaatccctcgaccatatttttctttcgtgctcattggttcgtgtcatgccgggccagtccaccatgccaaggcatcaacccagacacggcccaactatcgggctaggccggcatgggctcgacaccagtcatggcatgccatgcttagaccgggccaaatagccatgctatgggccgggccgtctagcctagcttcgggccttatggccatctatatgacgtgctagtctgccgcatcaagagtgaggcaacgtcaatgtgggtgcctacacacaagcgaggagttagggtctgtcctttagccttcccgtttaaaattttacaccgtgatggtactcatgaggaaattaaatttgaaaatataccgttcatatcttttttttcttaaaaatatcctagatgcaaatctttggacacaaatataccgttggtcttgctgaaccgttgtgcaaaattgacgtgggatgaagatgcagacagtcttgtagaggggcagcgtgagaccgcgcggtgtcgagcgacgagcgtgtcaaaccgcgagcattctcgtgcaacaagtctacgaaagtgtttcgaaaattaaaggcaaaatttgctcttggacactcgaaaaatatggtctttgctgaggaacaccataagaacgtgtatttgcttgaggacacttaaaaaacatggtaatttgttgatagatacttatacgtattattttataatttttcgctattacagagagagaattttcacaaaatgacacttttgcccctgagaccaatcttcgtcgacggggatcaaatccggtcgactcagcaccaaaaccggcctcgctgcccgtcgctttgtccacccccgccatcttccacagcagttcgtcacggtgtgttctccccgcgggcgacaactccatccattcattcacaacaaagagcagcagcaagtggaaagtcgtccgtctgcccatcgcgacggcgtccttgccaccgccgctcggcgcctcgtccttcaatcattcgtccgcgacccatcctcgatgtccaatgccacgagccgtcgccagcctgtgaagtaacagcaacaggagtagcatttttgtctctgtttatgaagcaacagcagctgcgaagccaacatcctcgccggcggcaaccccatccgtttgttcaaaggctcgcaacagcagcagcagcaagctaacttcaagctcgcagcaaacaaagagcagcggtaagccatcaaacctcgtcggttctcagccgttgtcctctgccgcgagatccaaccatccgtctcggtcgcggctcgtcgtggatctgcagtcctcgtcgacggtcgtgacgctgcccctcgtcaccgcccgtcgcggttgcccctcatcgttgctcacggctgcttcgcacaacctgtgtaggaggaagaaacggaaaaggaagaagaagacgagggtagaatagacattttatgtgatttctctctcctcaactaattgaatattgtattttaatgctcgtggtgtcccgtggtaaattactatgttttttcagtgtcataggacaaattcacgttttcgagatgacccctaaccaagaccgctttctttgagtgtcatgtagcaaattttgccaaaattaaaagattagcgatcaattaatgatgattagcgattaattatcttattatttaatcactaattaattgttgattagcggcaagtgtgacggtctcgctcattgagcgtgcgagaccaatgctaattttatgcaaataaaattacatcaagtatatttctgagaaataaaaaaaaagtgaatggtatattttaaatttaattcctcgcgaggtgctcccacactgtggaactagcagtaaaacggtaaaagaaaaagaaagaaaaaaaagagttgcgtccgcgccgactggtattcgcagccatccgtccatccgtgtcagcgtcactcatcacgcacgcacccatcaaaaagcttcggaggacgacgcaaggaatcatcaaagcgagacaccttttcttttggcctccttcctcgcgaaaaccaccaaaccaaaacccacacacccacagcttttctccccctcactgctttgctctccagtctccacctcctcctcctcgctgccgcgccgcccatccgccagccatggcgatgtcgtcgtcccgctcggcggccgcgatccgggggcggcgggtcggggcgctggcgagggcgaggaggcacgcgacgagggcgatggcgtcgctgttcggccacgtcgagccggcttccaaggaccccatcctcggcgtcaccgaggccttcctcgccgacccctcccccgacaaagtcaacgtcggcgtcgtacgtctctctctctctctctctctctctctctctctctctctctctctctctctctctctctctcattgggatccccgatctcgcttgattctgacggagatgttgggcggggatgctgaaactgcagggcgcctaccgggacgacaacggcaagcccgtcgtgctcgagtgcgtgcgcgaggccgagcgccggatcgccggcaacctcaacatgtcagaacgagatccctccctgtctcttccagttagcttcaatgcttgattacttgtgcatgtgcggatctgagctatacctgctgtgttttgtagatatgagcttcaataatctttggttcttgattcatttttagttccattctgaaataaaagcatgctgataccgctggttcgttctgaagcgtgatctatcactagtattttgttttcaaacatgatctggatcatgtgtaaagcttccttttccttcttcaatcacgcaatgtatgtacgcttgatgcgaaaaaaaaaattattgttgtcccatcctgccgcggtttagacctcctgtaggcattctgtggtaaaatggtttccagatgcttctttatgctcttttgtggtgtggaagtaaacatcattgcagtacagattagacactccaatccttttttttttttgtcctgaaaaaaatgatcaactaaagcataatactgtcttgcagttgatgctacacctgttttagtgctggaccgttggaggttgccttaagttctaatttccactaattttgtaaaacagggagtaccttccaatgggaggaagtataaagatgattgaagagtcactaaagctggcatatggtgaggattctgatttcatcaaagataagaggattgctgcggtgcaggctctttcaggcacaggtgcatgccggctctttgccgatttccagaggcgtttcttgccaaattcacagatctacatacctacacctacatggtccaagtgagttggaatcctgctgagacatgaattgttgttgttttctttacatctaagaaaaatctcttaaagaaagaaataggaagagaaaacatagatgtagatggtgtgtattactgtctctacatgatatggtaggcacctgtgattcttgctctccaatattgttaacatcatcagtatctaacattctaacctcagtgtgtgtaacttctccagtcatcataacatttggagggatgctcaagtacctcaaaggacattcacctattaccatccagagtcaagagggcttgatttcgcaggactgatggatgatattaaggtgattcgtttctccagtattgttagaaagatatcttacttttaggaattattacattgttgctggtatctgtagcaagatcatggatattgtttgaaattagatatttgtagagtcaatactgatttagctttctttctcattgataaatgataagttttaggtacacttagtttttctcactttcttataggtgcttctgacctgttgatgggtttcctatagctccttttaatttatttttgttcctctcatctgcagaacgctccaaatggttcattctttttgcttcatgcttgtgcccataatcctactggagttgatcctacagaagaacaatggagagagatatcctaccaattcaaggtagcagaagtgaaaaggactggctttttgttggtgttatcaccaacgacagatatcacattttccttatgtgttttgacagataaagaatcatttcccattctttgacatggcataccaaggatttgccagcggtgatccagagagagatgctaaggcaatccgaatcttccttgaagatgggcatcaaattggatgtgctcagtcatatgcaaagaacatgggactgtatgggcaaagggcagggtgcttgaggtattcactcgcctagtgtcatttatgcttgaaagttatatagttgtgcaatgcagtgctcctatgctctggatataattaagaggcacaaaatttacatcatgttaactactgttgattcaggatttgtactgttttcttcagggagagcatagcaaagctactctctgtattgcatgactaattccatgcatggtccttgaaaatgaaacgtgtcttagagcattagttatttgatttctcaaaaaaaaaaggaatttgcaagtggaactcatatctagcgagactgaaatattttcccttcaggaagccctcctgttccattaaggggaagagtatataacatcaaatagaattgagtgatccaatttgttatcttttctttaaacaatgatcatactctaatgatcataaaactgattttgtattgctgtttcagtattctgtgtgaggatgagatgcaagcagtttctgttaagagccaattgcaacagattgcaaggccaatgtacagcaacccacctgttcatggtgcactggttgtctccataatccttaatgatccagaattaaagagtttatggttgaaagaggtcaaggtaagaagtcttaactacgtaagttcctaatagattaatctatgtgaagcatggaaaggagtttaatatcgccactgggttgtctcagggtatggctgatcgaatcattggaatgcggaaggcactccgggaaaatctcgaaggcctaggttcaccattgtcatgggatcacatcaccaatcaggtaaagaaatcatgaaaatgtaccatttctgaatatgaattcagtgacatgcaaattataccagttcaaagtagttgccagcatctccaaggcccacaatagatatagtcaggttgtaccataaacttgttggagtttggttcattgaggtattagttcatgtggactgatgtactctagtgctggtcctgttgcttgaacttccagcataattgcaaactagtcaaagtggattttgtatcataaatattgtgttctaactcgaggccttgtcaaagtggttgtcttgagtcccaactaatcaattagaaatggataattgtacaatagctattaagtcttgtctgggtatagttgattcggtaagtaacagtgtcagtcaaaaactagtaagaaccactagcttcactcgttctccttgtaagcttacaagtacagacatatccattttgtacgattgatatatgttgggcaagaattatgtgcaacttaaatgtccatttacccatacttggttcaaattttcaccatgtatgcaacttgatatcattgtgtgttatgttcactcagtctctatggagattgatattccacattcagcctaatattattgttagttatatggtgaatattaaaaacgtaagcgtatttgcagattggaatgttctgctacagtgggatgacacctgaacaggtggatcgcttaaccaatgaataccatatttacatgacccgtaatggcagaataaggtacaataacagtacttttagtttttcatgttgctgaatctttgttttaatcgaataaaaatctaactttctgtcatttctttcagcatggctggtgtaacaacaggaaatgtggcgtatttggctaatgctattcatgaggtcactaaaacgaaatgaagctacttcctcttccctcttcggccaatgaaatgaggcttgcaagcggcggcgttttttttttggggggtggtctattgacctttaagatggttgtactagagaaataatccagtgaacatgctggtgtttctccaacttcggattttccctgtatggaggagagaactagaaacctacccaattttgagagctatagatgccgatcctgttatttcaatcgtcagatgttatgcctgtggcagcctggcaggtcacctcagaaacagagatatgtgaaagagaataaatgcaaatgagctgagcattttgacaagtcatgtgtggccctgccgaccgaccatgagaatttagataaaatttgctgctttttttgtatgtgatatcaagacgaggcaggcgtattctgctgaatattttttggtaaacgtagcatgagagtttagcatgtagactcgcaggaataagccgtctcagcgaagaacatttcatattgattcgtgcttttgggctctttcatactgattcttgtaactgagaaaaacatgcaagatgcaatgtaattttctcgagaacatattgtaggatgggtagcatactgatttgcactgtacagtgcatacgccaacacgaccagaaatgaccgatctacctagcagttagagattggatcgtgaggcatttgcaacaccagcaaactccttgcagattccaagtaaaactacatccagactatacacgtttttgtacaattgtcatccttttgtttgtggttctcccccctgatgtacaattgtgatcatctgggaccagatagctcaattggctctattatgaaggatgatgaatcatgaggatcctcatgccttactgagaaactgcaagatcctccatagggaggcacttctctattcaagtcgatgccgttctctggcagggtgacattagcttcaagggcattaaggacttccgacatcttgggacgcaaaatgggattggtctgagtgcattgcagaattacgtcaacagaacactccaactcggcgaaatcaaatgaatatttcagatccctgtcaaccagtttatccagtttattttcttccttgacttctctaacctgcagagaattaagattaggtggtaagaaagtatacaaggatatgggcatcaaatgacagtagttaggtaattagataaagattgaactaaaaggagatacccaatctagaatcattcccttctgagattgcgcgtgcccattgctcaaggttttaggcccagtgatcagttccaacaagagaataccaaacccataaacatcggtcttttctgaagactgtcctgttgataaatactctggagcaatatgtccaatagtgcccctaactgcagtagtaacatgtgattcttgtcggtcaagaagttttgccaatccaaaatccccaacaattgcttcaaaactttcatcaagcaaaatgttagctgctttaacatccctgtgaatgattttaggattgcattgttcgtgaagatacagcagtcccctggctgccccaacagcaatccgcatacgcttgctccaatcaagagatggttttccatgatggtaatctacaaattaactttgtgttagtaagagagtgaaatggaaaagaaatgataggagaatgatgcaaaatcaaccaacacaggatcacaacacacatctttgtaaggaagctatcatagttttacataatcatcattttagcttttggatcaacaacagtctaccttcaataagaactacaactggaaactggcccagctatattaaaacataaaatcaaaatttgttttggacgattgtaattacctctcaagcgatcagcaacactgccatttggcatatatggatatacaagcaacctttcttttgaggtcatgcagaatccatataaccgcaaaaggttcctgtgcacagctagaccaatcaactccacttctgtctgaaattgaacttcaccagtaatatcaggatcttttagtctctttacagccaccaaagctccatttctcagacagcctttataaacaacaccaaagccaccttgacctaatatgttctttgagttgaaattgtcagttgcactctgaagctcgtgaaatgagaagtgctttagatggcccaattcaatttcaagatcttggtctagaagtaacaaaagaaaagaatgtttatcagatgctatatattctgaactctgcaataagagagtagatgcttaaccctttgaaaattaccagcagaagcaaaaggcaagcgccatctgcaatattttagccaacaaatgacaaacagaacaaatactgtggcacagatgatgcttaatgaaattgccagagctagttgatgatggctgtttgtttttttcgacgggctagaaattgttgattctgcaaaggaaggcaaattaggtccaacagataaatatgcaagtatatgacatcaggtaaacaattaccattagttaatactgtgagatctttgcaaccatgcataattgatgaattgcaaaggaacctgtttcctgcaatactggaaatcagaggaaagtgatcatcaggagggtattaaaactgatgagaaggaattatgtgcatatgctttgggaaggaattatgtgcctacgcttagtttagcataagaacacagaaaatatgcaggtgccaaacactttggttaagcaaatggaaggaaataagcagagcttatcgtacgcactctcaccaacttacctgtagtcatgtgcatagatttttggaaccgggccgctcaaattattggatgataaatcactgaaacaattttcccatgttgggtaaaaatcaataattacgtttatacacaacatttataacagaagagagaatataaagtggtgaaaagagacatacaggaatgtgagacctggaagctttgcgacatcttcagggatctgtccagacaagttgttcttatctaggcgcctgaaggattcacaaacagaagtcatattttgggacaagcaaaatatgtggcacaaaatttgaagcaatattttggcatctgctcacagatagtttaattcagtcagccgccctagagaacttgggatttcaccaacaaactggttaccagaaagatcaagagctttcagattggtcaacttcccaatctctggaggaatgccacctgatatcatgttattctgtagtaacctgaatgaagacaataaaaatgttgagtaatcaagtaatggtattttgtttcattttatgaggacagacagatgtcaagcaaacaagttcatgggaatcagtatgaatacacgatcaacttaagtatatgacactgcaagatgtaatatgctcatgtccttacaaataggatgaagacaatcaaatgttggacaaaccatactcataaacatttcaatgttatattcaaatatgaatcaaatgaatattctatagtggtcacatagtaatagccttcaatccacatatgcagcacagttgatcattctgatttgtagggttagccaaaagaaacatgaatctctctacagattaagatacatttctactaaagcagtcagttaaggtgacaatatacttccagactatttatatactaaaaataataattgctatagaatctgcatataattttcacgtttgggtctgtagacaaactttggttatgaattctagtgctgcaaggttcagaaaaatgtttatagaacagaaaatgcactaattagtgagtcatgattatctcaactctttatatggatctatttcaatgatacttagaccaaacaaggtgagccgcacattcattattaccaggccttgaatcctgagaatgtcatttattataactaataggaagtgtgacttgctcacatgaaaatggtgttccaatgctagcattggaaatgcttcagttgtacgaaaagtgtcatttgcccacatgaaggtctataaaaaatattaaaaatggagatgccatggcatggcatctgtcccccactcttttcagatgaagaaaatgaaattttattcagaggtgccatgctatgtcagctgtcatctctcaagtgatgtattttacacatctgtcttggcctggctctggagagtaaatgttcagtgttcacggaccctacatggagttctcctaagttcaactacaagagacatagcccatagggtaatgccctcactttccagctctttaactatggagatatcaatcgatcaatcaccaatcggatggtaccaaatccaaaacaacagttggggaaaactgatcctaccaacccagctcaactaattttgcagtgctacgactatgagacaatccgtgctcactaataaatgcattaatggaacaagaacaaaacctttgcatttgataaggttcgaatgaattcgttcaagaaccccttacattgtctgcaggtggctgaggttcccgatgctcggcgacagcgtcccggccaatccgttgttcgccatctgcctgcagcagcacagcaatccaaccaaaaccgccataatcaacaccaccaccacgagcagtagcagcagcaataacaaaatcccacgaacgaatcaggagaggggaatcctcacagcgagacgacgaatccgtcgggggagcaggcgaccatggaccaggtgcacgggtcgacggagttgatgtcccaccctcccatcacccccttctcgtcccgcatcctgctcttcaccgccatcagcgccgccactgcaaaaaccccccacatcatatcaaaaccctaacccacctagggttcccgttccccaaccaaaacccacgctacccaacccacgcaccttcgtagttgagccccttgggcgacagcggcgggtccccggcggcggcgacggcccacgcggcgaccaccaccgccgccgccacggcgagggcgcggggccccgccatgagaggagtccgacggcgacgccggggagggcgaggaggaggccgcgcgggcgcagcgcagcagcggcggcggaggcggaggcggtggcttgaggtgggctacgctgcagcaggagctcgggcttggcggccatgggcgcctgcgcgagtataatactgccactgtatcgagctaagcgacgggggtgcttagcttaggcggggggtgtgattagattagagttaagattaaattagcgcaatttggttgggaattgggcatcttaattacgaaagagatcgctaattgggccttaattacgtttatcgcgagtggaggcgggtggctctctccctgcctcgggaatcgcgctcccaaaaaaggctcccgatttttatttattttcattttcgttttttttgggattcttttttgttatttgggtcggtgagaaatgtgaaattgtaaataggtcctcgaaattataagtagctagggaattggcgcttccggtctgccttgagccctcctgttgttttgctgcttgtttttttactgctcctgattgagctagctctgacacaacacaattgtttgttctctttgggaacactaaacatttgtttccttgtgacagtttctagacaatttaacattactgtatgtgtggacaagagggccattaaaacacagtttttttttttttgtagggaaggagggaagaaacaaacaaatgatggcactggtcctagacaacagtattggtagttgagaaaattgagcatgcagagaaatgccagattggtatcgagtcccatagtgcaatttggtttggatattgaagctacagagggtgataaggttaattgtgttttcattttctcgatattttatagctcaatgttctagtacattttttcattaaatctatgacttgccccgagcttaatgtatatccatatattatactcgttacgaggctggcctatattattataggtgggcgaggcatcaatagatgtaagcagcatatcgcgcatatcaaataaatttaataccataattagtcaatttttaattgtatctagattcgtgaaaaatcttagctattattctgtacacaacggacttagatatcttatatattgggcgataaacaatctgggtagcaacagctaaccactcctacggtcctatcatagcttcgatgtcaacaaagatggagccatagaggaccatctcatgtgattgcaactagatttaggtgctatccacaaggagactaacaacacctgtatttagatccaaatacatttcgtcatcactcatcagtacgatggagttaatcacaaaatcttttcctctgcatttcattgtcccctgaaattttctgtaaggcactttatcttgaaaaaacacgaacatgtaaatggagaaaatgtgtccttggaatcaaaagtttataaggaaaaagcatattttacatctttaaaaagttcactttcatccttcacctgttataaacagatgtgatttgtgccatgtcagccaccacacatcaccacaagcaccttgccatccttattgcttactttaccgtttgttctccgcagttagaacaagtgcaataagatttggctgcttcttctaaaagtaccgattaggttgtggtggagaagggaactgataaggcagagaggataagctgtttcttatgcaaatacaacatctattaatctttaaaaaagtgaaaaacaaagtgctaaagagatttatcattttccgtgtgcatgtttcccaaaatgctaaatgttactttttttgcaaacaacattctatacgaaagttgtttgaaaaaaataatattaattcattttttaagttgaaaataattaatacttaattaatcatgtgttaatggctcatctcgttttgtgtgtatcttctcactcttctcttttcccctcctctcaaatacagccagtgtgagagcaaacaaaataaataaaattataccataatattatggtttatgaattagagatgatatgttaaacgtgttgtgacatcccggcccagggcttaataggattaatagaatactcatatcaacaagttgcaacttcttttccggaagccgatctccaaagaactcctgggtgtgcacgagtgaggacaaagtgtgccaacttgtgttagtctgtgaggacagtttatgacctataaaagctatcatatgtaagcgggccgacctgggagaggataaaaaatgtgagtttttcaactttaactaatatttagattataatttatagaactacatattatcagaatctaggtgagaatatagattgcttaggggagttaaagactggattataatttatagaactacatattatcagaatctaggtgagaatatagattgcttaggagagttaaagacttgagaggctcctctcaaacatggtcatttcttctagaatctagagctcttcaaacagtctagacttttgttcagattgtgaaaatatgtagttgtagaatatagtaaatgaattagaaggaaaaaaattagcattttcagattctcaccagttagcttctcaaaacactcaagctcttcaaacagagctaaatatgggagtgggagtaatgtcttggttagtgggattaatgtatggtatgttaatagattaatttagatgcaatgtagcctgggatgcgcattagtccaagcatactaatctccggtaaatgttgcccaagacgaagacgagagcacaagcacaaactgcttttgcatgtgtatggtctatcctgcctgatggtagtacctactgccaagccaaaccagggaaaccatgaaccatcgtcagtactttcatttcggcttgtatatgtccacaattgtagtgcaaaaacaatctgctgcatcgttaggatgccgattcctgcgactgtgagaccagctcaatcaacggccttcagaaaattcagattaggccctacaaaatctgactccacctgctcaccttagaaatttgcagcactgttttgttctaattccaacttgtcagttgtcagaatcgtgattattgaccaaagaactttgaaatcatgcaggtagacaatgaaatctggggacggtgtgaaatgaagaagtcatcaaagcagcaaaaataaaacaacactgtatgtatatgctttgtttacagacttctataagtttgtagccttcccatagtcaacagcaactggaaaaaaaatagctataaaagattaatagagcaggtgtgtcagcatgatgataataaagcaaataaatagtgttctgctcaaccacactaaacagacagcatctctattgatgaaaggaccagccgacacaaccaattggttctcaactgttgcttttattctctcaatataggattggtgcagacacctgccttaaatccttacacaactcacaaatgcagacctcaaatatattactcatttatcaacaattttatcctagtattccagtgacaatgataatcacaacattcatctttgcagccaacagatgaggaaagttctctgaaccatatggtagaggaaaccagtagggggggggggggtaaacaagtttgggcatggggtatcataacaagagatttttccattaggaacatttacacaattacatcgacaatagggcatgagaaacacttacaggggcactacaacattaatcgtgggagaaagtagtacagtacttgggatctgatccctttcaatagcttaacaatacaccatccccattccctccagctatccccacagtacttggctaatcctgaccaccatggcctcctaataatggaggagaagcattaaattaacatgggttggctgtgcctagcacacccacctcatataacacattggcgccagctcatgttcagcttcccaataatggtcagattctacaccttaaatgtgagaacatgcaagttgccctttggcacaaacaagcatcggcttcgcaaagtaaaaataccatccagctgtcctatggtccggcagcaggcaagaaattgaacccacaatgtcaccgagcatgctctggtatcaacctgttgatgagctctggcgataaattcgctagctgcaaatgaacaagcaggcacataagtcggtcttttcatcttaacttagtatttttgttcatgaaaggtatatctgcctagaaattacttacttcttgcttaaagttgaacagtggggggaatggacgtccatttggcaaccttgcgtggggttctcgcaattcatcaaagaatgaatgtgcacatgcttcgagctgtaaattgtaatggtgattaatcagcatattgcatgaagttacactggtatgaattcgaaaacactgatcatataaattcaagggcagagaatggcagcattataggaatgaaaagtaagatagattgttgtggactccatattcacaagaacatagtgaacatgagaaatccataaacctcttgttcaaaaaactgaaatcaataaactggtagaaactagaaagataaacgaatatattgattattttttttctgttcctcctcgaaaacatccacgcacatccaaaataaagggttaaacataatctttccttttgcaagaatatccgattaaatgctgtacacctttaggagagaattaacaatgacatactggtgttatccaacccaaatccaatgattgacactagttttatacccacaaaataaaggatgcgtgaacaaataaaatatattgattattgatagaagatgttaacagacgaaaactgaaagtgatgggcggaacatgaccaatcaagttgaacgaaacaactaatgccataataatttggagcaatcattaataggtagatggcttcaacagttgacttgaatcagtcaaacaaaatgagatggaaaactcacggcagtgcatcgtagatttggtgcatactggagaagacgtgatgcaaggtcaattgcttctggaggcatccgcttgtggaaaatctgcagcataggatttgcaggttgtaatatgcactagtatcataacatcaattaaaaaaatggaatgctaaagtaaacaaaacaattctaataccttgtgccatgggtgagctttaatctgaggaaatctgaattctgtgtagttgggattcatgcagcggatttcctcacgtgttggagtaccaagaacctaccaacaaagaaaattcattcagtttatgaaaatagaaaaacattaagaaattttctttagaccgcatgtactgtagagcagtgcctaacatactacctttataatctcgacaagctgatccactgcactttcaccaggaaagagaggctggaaaaatggacaaaaaagatgtttagttcaaagtttgctatagtcaacctgataaaaaaaaacagtcaaagaagccacaaacaggaaataacctggccaaggagcaactcagcaagaacacacccagctgaccatatatcaattgatgtcgtgtattcggttgccccaaatatcagttctggagcacggtaataacgtgaacatatatacgatatgtttgcttcacctttaacctgcccagcgattgaatggaaaagcagatcaaaatgaggacagtagagttgcattacagcaatataaaagaaaaaagaaatacagcaatgtgaggttgatccagaaatgcactgtttttccccagtttctaatttgtccacatgaaaacagcaagaagatattcttgcaacaaaacgaacaaaagatctaatccagtaatttaaattatgtaaatcaaactgctaaatataccctcttgaaaaccagaaagaattgtgctatacaaaaataaaataaaataaaataaaataaaatgagctacttcagtatttaaatcatgcgaattaaactgctaaactaaaccctctccaaatcataaagaaccactccaatataaatatctgtaatcaacactaaaatgtgcattaactcaccaacatttttgcgctcccaaaatcacatattttgacttggtgagtaagaggatcgacctattaaaaccaatataaagtaagaatcagcttatattcagatactgttaaccacaggttattaaaatatcaagcgtgaaatgaacataccaaaagattctgaggcttcacatccctgtggcaaactccaggtacagtatgaatgtaagccaaaccacggaatatctatacagaacagacaagcaatatcaatatcatgaatacaactatggaaactaacaaaaagtagtaagcaactgtattgtcaataacatcttacctggtaaacatacaatttgacatatataagtggcatcctttggttcatgttgctataatgcttcaacacacgatacagtgactcaggaacaaattccatgaccaggttaaggaaaagttcatctctgcttgttgtagagaagaagcaatgcttcaaagaaacaacattgcaatgatccattgatcgcataatctgcaactccctgttcttgtaacgcttgtcctgtaaaaccttcttaatggcgacagtctcaccagtctccaaacattttgcctgaatgataaaagaaataccaaataagagacaaataaactttaaaggaggacaatgttacactgcagaagtttacctgaaagacgattccaaatgatccagttcccacaactcgttctgccatgtagctaatcgtctacagagcacaaaaatcaacccaagttagataaccttacacataagattgaataacatattgtggcttccatttatgttataatttacccttttaggttctccattcttccctccaatcgttgtggagattatgtggccggtgacaggatcactcccttccataagagaagcaccgtgctgtcatgtagcaacaaccagtgaggcaaggcagaacatcaacaatcaacaaagaaagaaaaaccactaaaacaaacaggttcatgacatctactgcctcaattatctaaagcggcagcacatcactaatgattccatcccatagcactagaactataaatccaagcgatacatactatcgacaatctcctggattgcttcatttcaaggagcttggaccaaacaggtgacacaaatgtgctgacttggcacggctgattactgcaagactaactgcataccggcatttaccctacgaattcataacaataagctagcaagagtcccaacaagactaatcagatgacttacaaaccttgctaatcgccccaacaccaaacatcgcatcgcgcgctcattcaagggctcaactcaactgaatgctcaccaccaaggcgctaaccaactaattgccccctcactagaacaaattaaaccataaacaaccataaataagtactaggaaactagtatcatcaagccgtccaagtttggacgcagctggtgatgggatggagaagcgcttgcatggcgcacacgcaaaggacaaccccggaggagggcagcgcatcccctcccctcccctcccctccccgccaagcaaacgcgccatgctgcgtcaacccccaccgcccaattcagctcgcctccgacctccgagcacgagccggcgcgcaaaccagggaagcggaacacccacagatctacgacgcggaccaaaccaaccgcggagaccaaaaccacctaacgcgccgcggaagacgaagacgaagacgaagagacggcagcagcaagcaaaaccgcagatctggaacccccccccccccagagcaaaccaaccgcaagtttctccgctcaccttttcaccggcgggggcgaccgctgcggcggccgcggcggagcgcggctggtcgacctgcatcgggtccgccgcggcgccgcctccggtggggtggggcccgcccggcagcgtggccatgggggggggggcaaatggagcggcctcctctctctctctctcctcctcctcggcttctctctcctctcgtctcctctcctctcttctctctcctcggcgaggaggttggcttggcttggcttggctaggcgaccatgagatgagaccttccttttttttcctctttgtttttttattcccttcttccaccacccactacaggaagacggcgttttttcatacaagggcttggagtttcgggaaatagcaggcggggtcggcttgtccgaagcgaggtcttacatttcagcccctatagggagctatttgtgaattttgaatgttttaagggttttgtgtaagtttgtgagggggggacaaggtcaatctgtcagtctggcgcttggaatctcccatgcggggattgagaattccgtcatcttttcctttttttctggtttacccctttaggaatttggaaattggatattatgccctgaagattatttgtagctttccgttactctaggcataggtttagttcgaacgtactttgttcgtactaactcatttcctcccgtgcgaaaaacgagttatcgcacaattaagtacgtaatccctcaatccaaaaaaaggtaacctacgaaaggatgtacccgtctagtatgtgcagattcattatattagaagttttttttccggagggagtacttgttaaaatgcttgataaatataaagtaaattgcatcatcagtacacgaatttgtcagtaggtgcaatctagtgcacgaacttgtaaaatgcttgttttggtgcataaacttgtctggtgcgtgcggaggaaggcgaaaaggacgctacatgactaatcttattgatttagaggttgattaaacatatatctgagaaggttgcaattagacatgcacatcttcaataaaaaaaatagaatatgatatagtgatagtagaaaaagatgaagaaaaaccaagcaatgccaacgatattttggtcctcgtttgcacgaactagacaagttcatgtactgaaacggatatttcacaagtttatatactaaattacacacatctaacaagtttgcgtaccaccaatgcaattgactctaatattattattatgatttttgaaacaatattttatagaattttttttaaaaaaataatattgcttggtattttgggaagtagtgcgcgaaaaatgagagagtaaaagataagaaagaggagtagcgaatacatcttagaagtttcgaaagccgtgttaaaaaggatcctccttgtctgaaaggcgaaaacagtgtaggaaggtgtcatggttacggataaggtaccttatattaattctacgatttatgaaatatacagatacgtcacaccttcatatgcgtgatagatttccgtatacgataagaaaatcgacaagagattatagaaataatcctcacggatagaaaagggttaggattatactatatcatgtaaggtctgaggtttccgagttctacttggagactaaggggattcacggtataaatacatacccgctaagggtccagggtatcaaataatagcaccagccaacccgccaccatagaagcaatccagagtacttgaagcctactcgccagtagatcacgtcgagactctcttgataaggatctcgctggtagcctcagaatcagttgttttctattgtactatgtggatttttatatcaatctcatataaactagattagggctattatcttacgaggggcctgaaccagtataattcttgtctttttgtttgctcgatgtagaatcgtatagatcatcgtagcaacgtaccccaatacccatactattcggtctacgggtatccccgccgacaggaagaaaaaatgaacatgaatatggacaactatgtgaataaaagtaaggaccctttcctctggaggaaaaaacatagaaattttcaaggattttaattttcaaggattttttttatgaaagcctttgaaatagagggttgaatcctaccctatcctttgaaatacgtatggaatggacaatcttataaagatcttacagaaaacttagcaagagctccaaccttttagaaaattttctttgagtctatctctcttatctgattcttgtgttcttcttacggtccaatcaaacgggttttctacatttttcctgtagtttgcaatcatttgttttgcacttgcattttctgtcagaatcctatattttttttattcttatgttttttcattcttataattcaaaaaggtccttttgcaggtattttatcgggctaaattttactactattctaattagaatctccctaccattttacattagccggatatttctatctgcttaatgaaatattcgtggtctttaagaaaattcttcccactgttatctactccgtactcctgtattttttttcgaatataaagaagtcgcgcacgttttgcgtggtctaaggatcggtcgatttcaatacaagtacagtgaattgcgtggtcctgtttgggaagaaaacagctgcatggtctacgatttgcatttgaattattttaaaagagataaattcatgtgagaacaatatcctacgaaatctactttactactcttaaatatctacaattactttactaattcatgtgagtaggagtagtctagtactcggtgtattgcatgtcaacgtctcataggtaacgtagacaagtttttacacaaatactactgtacttcaaagtcagcaattgattggacagctgatattattgattgattcccaccagactttgttttcagtatgtcgccaatactattccagagtttttttttccaaccgccatttgtttcacactctatatggtgtaaagtttcggcatatcacatcaggtactccccccgtcccataatataaaggattttgatcttttgcttgcactgtttgaccactcgtcttattaaaaaatttgtacaaatataaaaaacgaaaagttatgattaaagtactttaaataataaagtaagtcacaaataaaataaataataattctattttcttaataagacgaatgatcaaacagtacaagaaaaaaaaatcaaaatcccttatattattattattgaattgagggagtattatatagggtgtcgcatatggtgttcgtgcactaataaaaaaaactaattacagaatctgtcagtaaaccgcgagacaaatttattaagcataattaatccgtcattagtaaatgtttactgtagcaccacattgtcagatcatggcacaattaggcttaaaaagattcgtcttgcaaattagtcgcaatctgtacaattagttattttttaccctatatttaatacttcatgtaggtgtttaaacattcaatatggcatggtgaaaaattttagggtgggatctaaacagggcctatctctgtctcaaaagacaacgctcccttcgtcttattactccctccgtccaaaaaaaactgatacttacatcatagttatactaatactaatttcatctatcacccacctccatctcaaaatataagaacttatgatcggatgtgatcttacctactccctatctagatatattgtactaagaatattccatttgattcttatatttttgatacaaatgtagtactagattgctatattaacgaggacatagaaatcttttaacattttcttaacgtgtcttccactagctaaaactacatgaacaaagggagaggggctatgttcgaaggccagagctgccgctgccgcgcaacgccatacaaatgaacgatcgattcattgtagcagctgttgcagcgccaaccatacctatgggtaccgaacagacccttgactagcaggattttttagagtaacatactaacatgcaaattttataaaatagtatgatattcagtccaagaaattaattctaaatggtatgtataattcaacctttccttacagaggttttaccagaggttaatcagaaggtaaaaaaaaaaaaccttttcgacgagttccacgggtttgctcaaattttttattgtattattatgtaaactagaaagaaagcccacgcatatgagcgggcaccttatttattatctatagaaataatgttaatagaattaagtcatatttcactatgcatattataaatggtagatttcaacttataattaaaaaaaagtctttgtcgctaaattgaccctagactttgataaacgataagaattttcttatattcaagcaaaaatcacttttgtctagattacacgtaaattcgcctattatcaccattactaattatcattgttgcttgatgcctttttaataaatggaactacatatgtatcaccaaagtaagcctattaatcattaatacataaaacattaatctccactacatacctaaatgtttatgtcaactcttatttctaaatctataaaaaaaatattctaaaaataccgcttctattggttaaagggataacaatgttaaaaattagacatgaatataccctctaatgggtagagctaccaaggatttatttctctagtgccttcaaacatgggtttcgcagtgacgtacttgtgcctctcaaagccagtgtggagcataattctaagtcttatttcactatcagcaccctcaaagattattgcattagtatgtaggaagttgagtactattgtcaacggtgacctccattgagtctgtctcaactcaatcatatttacgtccctcctatagttgtgttaactggctaactgctcgatgcccttcaagaaagaaagagaagatagatgtgatgaaaataattctttccataaatttttttacgttttgagtagagacaatttgtttacagtgttaatcaatactgcttaaatttttatggaatagataaaatattttcttttgaaatgagtgagattgatcattaagaaatgtatcgctaaacatacatacgaccgtaacaatctttagagtatcatatcaatatttatattttgataaagatatatattttagcatctagtttattttcgtcacctattgttcataacatgtctatcaatttaaataaaaatcgatggcgagattacacagtgccacatgacggtgtaagagtgcttgtagaagcatcacgtgaccatatttgtgaagtaataaattttattttttttatagaaaatcctattttaaaaagatcgtctattttttaatgatgattctgacatgtacatatatttttctttagggttttatagcttgtttaacgtacgtccttttttttttcaaatgaacagtaggtaaatgtattttttccatcggtaaacggtacgtactttttcaaatgaatatagtacgtaaaggtatattttttccggccccatcgtacgttttcccggtatgcagactcttttattaggtaagtataaacggattctgttgttatataagagtgcttgtaggaacaccacatgggaacttagtagtgtttataggaagattaaaggacttaaagtatataatagatagatagatagatagatattggcaagagactgcatgcgtctctgcctctcagaatgaaaaagaaaattctaagcagaaatggactccatctggatgggtgggtttaggcctttaaggttagaagggcccatctagttggagaagaactggatccaagtttaactggccctttctgaaacttgcacggcccaatgaagaaaacttgggacgacaattaggcccatttgcccaaacaaatttggtcagcccatcaaagaggtaacgacgctcatgctgatggtgctgagacttggatttcgccacgccggccactacaggaataagttcatcggaggtccctcatcttaacaacaagattttttgaggtctcttaaccacaaaaccagaaatgtgtactcctaaacttacacaaaccatgcactcaagatcctgtagcagtatatataggtggtttcgctgacgtggcatcctagtcagtaaaaagaattttaaaaatacgtgggacccaaatgtgcaactgacatgtgggtcccacgtattttttttattctttttgctaactaggatgccacgtcagcgaaaccactcatatataatgccataggaccttaagtgcacggtttgtgtaagtttaggggtgcacatttctggttttgtggttaagggacctcaaaaaatctcgtggttaagttgagggacctccggtgaacttattctgccactacactggcgtttgctagggtttgcaagtgtgaaacacctaggatgataaccaataaccaatactaattccttaaaaaaactaacattgtctcaaaatataagaagctactattagatgtgacacatcataatactataaatttagaccaagagtttatctaaattcgtagtacaagaccaatgcgacaatgatggcctttgcaggttgtagccatttttgccagccactacattggcgtttgctagggtttcgtataaaaaactcttaagaaatcaaacaaattcattcttttaattatagtagttaatacttaattaatcatgtgttttttatttgtctcgttttgtaacacatgattttagaaacacgaaaatagaaaagaaaacacaggattgaaatatcatatatagatgaattccataggaatccaaaacactgatatttgaaagataatgtgtttggacgtttcacaggaaaatatctcgggaattcaatagctttttagagagaagagagataaagagaagatgcattgtacttttcaaaggaaaaataaaatgaggtgtgagctcaagtgaaaaattctaatagaattgaactatgggaaaacaatccaaacgaaacaaccaagtaggaaaaaatcctatggacttgaatccttcaaaatcctatgagaatcctttagtccaaaggagccctattagcttcaatatgacagcagttcaatctttaattttctcagttataatccgatcaatctctcggcatggtaattaggcgcatgcatgatggagcagcatagtccagatatgggagtattaaaaaattgcagcaagttttttttttgagtcgagaacttttaaatgtaactatattttaactgcactgtaactacatctacactgtaactataatatataaaacttgcattcaattattatttagttagctatcactgggatcttacacgtgacatgtgtgaaaatttctttttctagcatttttttccttcatgcacaaatctcgaaacgattaaatggtcacaaatctaaaagttttggaagaaaaaaaaacttgcgaaagttttctagcaaatcagccaaaagtagcacacatgcatatcctgatatatatactctttacaggatctacagatctttctgtcttatgtcgtctccctgctagtccctactaccgatcattcacaaccttccaaatatgttgcatgtgccgatgctctgctcccagctggtttaattcgatcgccatgggaagttttgagggaggatcggtcgtctaccatgcaaaggaggcatgagttactcgtttgttggtccatgcatatacaattatccattgctgctagccaacaagacgaagctatacgcccgtgatgaagggatggaccttaggattgaatggagggaggcttatcttctcttctttttcctccatcctcctctactcttcttttcccttcccttctccttctcaccatggagatggagatccaatgaggttgggggcagggcttgagccaatcatgttggatctgccccctacccagtagtatataggatcaatcgagctacaaagctaagggtttaattagttggcaaaaaaatttacctctgcatatcacatcggatatacggatatacggacatacatttaaagaattaaatgtagtttaataacaaaacaaattacattcctccaagaaaccgcgagacaaatttattaaacttaattaatccgtcattagcaatcattagcaaatgtttagtgtagcaccacattgtcaaatcatgacgcaattaggtttaaaagattcgtctcgcaattttccggcaaacggtgtaattagttttttttatatatttaatactctatatatgtatccaaacattcgatgcgacagcgtgaaaaattttgtttgtgaaataaacaggccctaaataggattgtagtgatggaccgatcgtatcaatcttcggcaaactccatccttataagtgcttatctccgctactttaaaaacaaactcgtactcctaattcctcatttctcacagcagtagttcataaccaccttcaaataccacccacccaaaattttgatacgaaaatcaaatcgaaaagccagataaaaaaactaaaacaccaaaattttgatccggataaaaactcctaaaccatataaatctcaatcccacttcaatagacaggggggcttgagccttatacatgtttccagaatctagtttaaattttgttaaatcatcgtttagattcaatactatcaattgagctctatcttaactaacgctagcctttaataattttctgactccgacactgctaggtcgtgaaagaagaagctagtgagattagtacgtgtgtgtctccctacccatcgccggccatcacagtaagggtccccatcgtttgtcttattttctaagagcatctccagcaatatgctttattttaaagcccctaaaagtcaaatgagggctgcccccatcttctaaggatccaaaaaaatacctccaactctagcaatagcccctatttcttagcccctactcatgtttctctttattttaacatgcaatccttctttacactatgtttaacaccacaataattaaacataaatatttctaacgcgtataattgaaccatagttaaatttacaatttcaaacgccacaattcaaatccaaaatcaaaattttcaaacatgtaaatatggtgtgggcagaatgccatatacaacaacatgcaaccaaaatttatagttcaccaatgaaaacgaaaattgctcaccaacatgtcattgtctgtctccatatcaccacaataggctatgtgaacctagtgatgcattattttttttgcggagatgcactatataatttaaaaataacacaccctactagaatgaatggttcgatcataaaaataacaaatctaaaagtagtacatatcctactagcaaatgacacttagataattgcagaaattaacacaaaaggactccaagaaccaatcgtggaaatgatatatcctactagcaaaggacacgtggatcatccaaaacgatccaacttattccatcgaagtgctcaaacttctccattaccgtcaccaaactcacctccaaagccactactaccatcaaatccaccattgagggcagccacctttgaagctgcaatttgtgtcctcatagccaacacatatgttctcacatctggttccaatgtggaaacatcacaaaacatgatcttctgttcttgatcccacactaaattatgctcagcaaataagagcttgcgctcttgaatctccttagtttccttccatctctcttctttcactttagcttctttctctttggcgtcaagcaaatctttcatcgcctccttttatggtccatcttctccattcttcatcttctcctttgcttgcttcctacccattggtctttttttagcacttggctgtaataaatcaggagttgtactcttcctagcatcatctccttcttcatcttcttcactagcactctcaattggggtggaagacttcctagaccttggcctcttgtgggattctagagtttgaaactttggagaattcctcaacttgagccaacaatgattaaactgaaatgccctattcttcgatgcattggatgagtacaatgcctcagcttcaagaacctgaagcaaaattcaagtgttagtttacatacatacaagattgttattaataataatgaataaacaatttaacttacaagctcttgatgtggtatgccacttggatgtcgacgctcaatttgctcgtagcagccctgaaacttgcttacttccttctgaatgttatcccaaagtgctcaagagagtttgcattcctatcagacttaaaatcacagttagcatggtagtgctctgcaatcctttgccaatatgccttccctggttgctcattgccaataataggatccgagctaatgctttgccatgaaatgcacagttgaatgtcctccttacgattaaagttgcttgatcttttggctcttccttttgcaccatttgttgaagtatgaaggtcttcattttgcattggcaaggaatatgcctcaacatgggtctcttcggacatcatgcacacaaaggaatcacattcatttgccatcacaatctagtcactgcaataagtagataaattgacaacttctccaatcaatctcaggaaaaatggcagatactagctaatatatgttggtagaatgcataatggtagcaaatttttccaatcattagaatttagaacaggttatgctagagctctacaaaattgaattaaaaagaaaaccatatagcaccccaaagcagcttattttttctcttttttaacagtctactcgaagaacctgcatataactaacatcggtataaataaaattgtgtagctcaggaaattaagcagcactacacccataccctctagaatatgatcacaagatttcagctggcacagtgtctcaaagtcatgcatattgaaaatcacactgaaaaccatatagcactatccaaaacttacaattcccaaaaccatattagctcgatccaatttatctttccccctgctaatttcagttacagtttttttttgtgttgaccttattactaatgcaattgtttaactacttgaaatcaatcatcattacatgagctcacctgaccatattatacatggattcagattttcatttgtcaatgaaggagttactatccaaactatgtttcctatacgcgtatgcatggctacttttcatatttctgaaactacaagattaggaacctactttcaataaattagattattcaggaaaaaatcaatcagatcattccaaagaaagtataattacatatggattatgagattaattattgtattaattaacagtcaaacatttgaggaaaacaaaatcacataataaaacaacaaaaccatctcatcgtggaaggttagttcctacccatttcttctccaaatatacattttcgtactgacaacttttctctctaacacgctaggtgctaccatataactcaatccacaaatccactggaaaaatgaaaacatgataccttcaactagcgccagggagaagggcgtcaggatccaggaggatattgccgggtgggcaggtggccggccaggaaggagggcaccagggaggacgcctgcaggggaggagggtgccgccgtgccggccaggaggaggatgttgggaaggaggaggcctaccgaggaggagtgtgacgggcagggaggagggcgccacccgggatgagggcgtcggcaggggaggagggcgctggccaggaggagcggtgtagatccgtggaggcgccgctagcaggatatttcacgcgaaaaaagaagtgcccgcgcgtctctgccgcggatgggggctgcggagaaagcccctgggactgggggcctgaggggataatttggaggccttcctattttaggggctttagtaggggtcttgttggacctgattttttagtctcaactctcaaaattagtataggggctgtgtttagaacctctactggagatgctctaataagcaaaaaggcttattagaaaataaaaatgaatttgcaggtgaaacttttataaatgtgttttttgacttaaaagccaatgttgaaaaagaaactacgttgaaaatatctcaaaattaagcttgaaaatttaaaatttagctttttctttggctgattaggccatccgatgggaacctaggtaggttccaaacgagcaccagctaatttaacagggcagcgaggcgagtcgatcagtcagtccacatcgatccatcgatggatcgtccctcgtccgtgttcgcatcaacgtacgtgtaccacttacacccgaatcgatctcgatccgcatgtgtgttgttctgttcagccagcgcaccctgcggccggccttggcgttttatctacagtagggttttatgtcttggaaacgtctatttctaagggtggtgggtgataggtacaaatggtagatcatttcggctagaaattttaaaaatggggtgaatagtaaattcggtccttgaacttttattcaggggttgaatcagtgttcgttgttatatgttatccaaatttcaaataagcccctaaacattgtcgtgcggctttgacccactgaaaatgccatgaggtcttgcagccaaagtcaacatttaaatatccattttatccttacatttttataaaaaaaggaaatagaaaaaaggaagaaagatatcataaaacaaaggaaaatgttaattctttagttactaatagttttttttttgctaatggttaattgccatactattttttgttattttctcaaccgttctttttgatttactatgaaaatgtaagagtagaatgtacatttaaatgttgactttgtatgcatagatgatatggcatgttcatgcggtttttttaagtaggtctaaggactatattaataccacaactaatcttggggatttctttggcaatatgaaccttcaagaactaaatttatcatgaagcgaaagttcaacgatcttattggttattcacccaaaaaaacattcttacgatcagaatagtgaatcaaaaagaaaatccaaatggtgtagcacgggccaatttgaattagtgcacaacaaaaattttggtagtatcaaagcttaagtaagttttgactctatacatatgtttaaggaaaaagtccaaaataacacccctccccgtgatcttttgaggtagttcgatttacatccctcaattttagtatagatattttctactaccaaactcttcaaactagacaaattaccctctctaacctacactaaggtggtattagtcctacatggcgtacatgtggcggtagtttggccacatattaatctagctagcatttgagaaaataaattttaaaaataatttcagccccacttatcatcctctatacatcttatctcttaccctctcatctttctctctcccatgccattgccacatgtcgttgccttacatgtcacatgttcgccttgtgttacttgtggaagagaatggaggggcctacattagctctcccctccaccaccatcaacgagcttactggcagccattctctgtgaatgatgagggaggctgtcacgccccgaactagtaccgaccggaactagcccgtgacgctctaaattaacctgtaaatcgataccagtcccaggaaacagtgctggtatcacaggaagacagattattacagcaacagaggtctctttattatagagtagaggtacagtcatgttgggctgcggacagatcccgagctcacaactgcattacaaaagggaagcggaagccaggacttggaccaaacaacacaggcgcgacttgggaactaggccgaaaccctaaaactcatcgtagccagcttgctcctggaagaactcctcatcagcaggatccgcttcatcttcttcagcaactggggggggaattatttatatagagcaagggtgagtacgggagtactcagcaagccaggggaaataagtgtttaatgcatgcttcaaggaaaggctgttgtttttgcaattgattttatttaaactcttttctgaaaacaactaagtgagtgcttctcaaacgacacggataagacagtgcgtcttgtccggtcggagtatgtgcaatgtatcagtctttagaattgttcaagattggcacccggccaacaactttcaaacggccacccgggcctagctgatcccatcagccgcagattttccaaacatcgaacccctttccacaacagcaatttcacaagcagtagtcaaacaaaactacgctaggaatcacctcacatccgcccatgaccgtgggcacgactgttcgaacagtttgttaacctctgcagagggggtacactttacccacacgacattactaacctggatcacccagcccgtggggattagccacgtcgggagacctccaagctttcatgacaaggcatttccaaagccgacacaggtttaccatatgccgacgagaggggtcccagaccgacaacaggttaggtcccagaccatactgtgccaggaagcccaggggtcctccccgacaccaccccggcgaatccacatgtctctcgtcatcaaggctcccctgatacactagttactcagctaggggtgtcccattccacccatgtggtcgtacttgtcttatgttggatgaaattccaaggaaacgttccttaagtgcaagagcgggaaaccgtacacccggtacgttccccggtccgcggttttggaaattcatttagttcgcaagcaccgacccaggtgtcgggttttccaagtcttttgtaaaacccaagttttacccaagaagttactcagattttatgtttgaaggcggccgtcgatactcgtgcagagtgcacggtttccgaggcgcaactgggtggtcacaagggaacatgggataacaattaacaaaggaaggatcaaatgcaacaaactaggtaggtccgctaatctgccttgcagacgggacaaacagattaagtgcgatcctatcaatgcataatatttttcaagcaacacaattaaattcaaatataggctcaagatgttcaaaggtggcttgccttgctcgagatctggaggttgatcctcgaaatcctcgcactgcgggtcttcgggctccgaaactacacgcgaaacgggacaactcaacaaacggcgaaaataaaaccctattaatgacctctaagcgtgccattagatagatctcgagatttgaggaattttggaagttgaacggagtcaaacggatttacggttgggaagatattgaatttctaagattattggatttttggtctaaaggaaaacgatttaattaaatcctttttgaaaaagaaaagaaagagagaggagaagtagacttccctcgggcggctagggcgcggcccgagagaagaagcgcggctcggccgagctaatgggccggccggcccaagaggattcggcccagtagggcgcgcgggaggggaggagagagggagccggtggaccgggctcatctcgcgtggtcccgggtgggacccgcttgtcagcggctcggctcaccgtgaggagggagcacgtggcgcggcgctagggtgaggtgtggggcgcggtgcacgcgcgcggttcgcggaggacgcggatgcggcgggcccacgtgtagcctcacggctcgcggtggaccgcgcgcacggggaggggctgaccggggtcggctcgacccggtcttggccgagctggcgccgacgtggcgcctacgtggctgccacgtggaccggcgggaggtagacgacgacgccggccggaacggacggcggacgatagtagcgagcggcggagcgaaccacggcgatacaggcgaaagcgagcacaccgggtggttgcacgagacgagaggagacgagccaacggctcggattcgccggaggatgcccgacggcggcgaattgcggcggcggcatccggcggcggaagaagggggaaacgacgacgaggtcacgaggggccgattcccggcggcgagagcatctatgcggctacgggaatccgtcccttgcgccggattaggaggaaacgcttcgagggaggccggcgacgagaggcgttcccgagctcgggcggcgacggcggcgagcacacggcgagcgacggcaacggtcggggcggcgccggctagctacggggaggctactcgtgctactacccgagtctaaggggaggagatggaacgaggagggagaacggggagatgcactaccgtgcgggcgggcgcagtgacgagagccgacggcgcgaaacatgatcgtttcggcctcgggccgaggaagaggaggaagagggcgcggccgaagtcccctttcgcgtccttgctcgtgccggctcctccgacacgcgcaacgacgaacggcgacagcgaacaggggcgacattggtggcgagagacgaaaacgagggagattggagggggaggagcttgggtttaaatgggcgacaaggtcggtttgggagagaggaaccgacattggacggtcaagccggcgagctggcgctccggctagcggccaaaacggcgacaggaggtgacgccggcgagagggaaaaagggagaaaaggggggagagaaagggggcttgtcccttgcttctttgggaaaaggaggaggggagcgggggcgtcgcggcagagggaggaggggctctgcctccgtcccttggcggcttgcgcgcggagtggcggggccgaggcgatgacgatggcgatgacggcggggcggtttggagcggagcggcgacacgggcgacaggcgcgggcaggcgctgatgacggcgatgacggcggggcggtttggagcggagtggcgacatgggcgacaggcgcgggcaggcgctgacgatggcggcgaccaggcggtcggccaccacggctcgcgcgcgcggcttgcaacgggaggcgcggcggattgagtggcgcggctcgggcacgcgcgctggctgcggggccgagcggctgtaggcgcggcagggcagcggggccgggcggcgcagacggcgcaggcgcgacgcgggcgacgaccacgcgggcgcgcgcgcgaacaatggtgcgcgggggccggcttcgcgggcggggagctcaccagggatggggagaaggagagcgagggggaggggcgctcggcgcggcgctcgcgcacgcgcgggcagagcgaggggaagggagggcgctcgacgcgactctcgcgcacgcgcacgcggcgcgcgggcggagcggaggcggagggagagagggagagagagagagagagggagagagcgccgggagggagggggagatgggccgagagaaattcggcccatcgaacccgggggaggcaaaatagacttttgcggaggaattgatttggaaggatttggattcggaattgaactcgacgatagatcggggatttgagatctgagaagacacggacgctagacgacaagcaaagaaacaaatttcgcaattagggtttttaagagataattttcccgctaggcgccacgatggaacgggcgctacagaggcgggggatggagttatagagagggaggcaaagcggcgacaagggtggaggtggtagatctggcgatgtccactctcccactccaacacctctctcatcggccggagaagaaggaggatgcagggacctcgaggagatgatgatggaggtagagcacggtgagacccacatggaggtagatcttgccgcagggcagggacccaacgctcaggacaatgcaactgacaatagtgacatgacgtggatatgaaactcgaggcgatgctgctgcatcttctatccagcaagatagggaggaggaggtgagacgctggcaggcaaggtcacggaggaggtggagcttggtgctggagacaacggtgttgatctctaccaccgaggtcgagcctagggccaagcgagagatgttagtggtgggtggctatcaatgtagctgttgttcgattggagattaaggacgagggagagaaaagaggaagaggggataatatgtacactgataggcgagccctaccaattttattgttattacttcttccgtttcataatgtaagactttatagcgttgcccatatttatatatatatattaatgaatctagacatatatgtgtttctagattcattaatatctatatgaatgcaggaaatgctataatgtcttgcattatgaaacggagggagcattagctaacatgactatcacatatcagtcaaactactgccacgtggcaccaaagtcgctctggatttagttaagggataattcattgggaatgaaagaagagtatatgataacaaatgtatggtgtatggtgttagagtgagtgtgcatattggaggggtgggggtttgtttaaactgtactatgccaaaagtttaggtggtaaattagattttttttcctctctttttattttacagttgaggtgcttcaactgcattgatatggagaaaactttgcttcaatttaattactcactctgtcccattttaagtgcaaccatgagtttccatgtccaactttgatcgtctgttttatttgaattttttttataattagtatttttgttgttatgagatgataaaatatgaataatactttattcatgacttatgtttttaaatttttttaaataagacggacgattaaaattgggcacggaaaattaaggctacacttaaaatgggacggagggagtatctagctaggatgcagtaagcaattagtagggtaaaatctgaagcaaactgactccataatatcctaggtgacaggtaaaacaacaatacaattgatcaattaaggtgaacacatgtgaaagggcctgtagcctagtggttacaagagcctcagtagcacataaggtcctgggtttgactcctcatgagagcgaatttttcaggatttaacggcgttgtgctttcagtggtagacgacatacccgtcaacaacgaggcgcctgtggtgactgtcaatctcgaggatttgccagcccagtcttcgaagatacttatagggtagggtttgtgtgcgtgcgttgataagggtgagtgcacgtgcgttgtgagtgtctacgtcagcgaggtgtctgtggtgacttcgtcaatctcgaggatttgccgtgcgttgagtgtctacgttatactgtgtacagggccagctctacatattttagggccctaggccaactccatgacatgggcccttaggcatacactctctctctatatacacatatgcactttggatttttaaagtatacttttgaagcattcatccgctaatcatgctgaaaataaatattgataatatcctctatatatgttgctaaaaataccaaaagagcattaaaatggaattactatggttaccttgaattcttgacttaggatcaagctctagggacttcattaataatacttgacaaaagataaaatgacagatatccatttgcttctcataaaaaaatactccttcgggcatttcttgatgcaaaatcattaatgacggtatcgagatcaatattttccaagacattcttctcaatgcagcacatagccaagccatttaatctttcttgtgacatggttgatctcaaatagtttttcaataactttaattttgagaagcttctttcagttgaggctactgtcacaggcacagttaagaggattcgataggcaactaaaacatttggatagcaatctgcagctgtaatgaattcaagaatctcaggtgctgacttcaaagcatctggcaaagtcgcttgcaacacttttaattcagaaaagaagtcatttagctcaacatcggatgagttattatgtgaaaatgtctctacaaaattagtgcagcactgccatagatcagtatcatccaaggatttcaaattctttgaggtgaacaagaaaccaaacacattttcaaatgccttcaactgctcaaatcgactagtcaatgaggcaattgcaacatcaatcatgactaggaagtaattaactctaaaggactccacaactgattgttgttcttcattttggtcattttgttcatcaaaatgtttctttcttttagcttgacgttttgtaggaaattttggttctatatccatgtcagatgcaatgacttttgcaatatctatactagaagtgaagccttcatttctgtacctctggaaaaatgatatgacaccttcgatttgcttgagagtagcatccatgcacacaatctcagactgcaacttcttgctgaccatatttatagaaaataatatatcatgccaaataaccattccaactaaatattcaaaattctctagtgcagtgaccaaagattgagcatcactcacagcttttgggtcatcggtagaagctttctctagttccaacaaagctgaccttatttggggagtttggtatctaatagcttggacactttttattcgactctcccatcgtgtattacacactgatttgacagtcaagtgtggaacattctcaagaaaaatcttccatctttttgtcgagcatgaaaatagtgtatatattcgttgtataacaccaaagaacgaaatagctttattgcacgattttgccatatcacatagagttaaatttagactatgacatgcacatggcatgtataatgctcttggattaatttcaagcaaacgtttctgaactccttggtgtttccccttcatattagaaccattgtcataaccttgtcctctcacatcactgacattcaattcaagggagtccaatgccttcatcagttcattaaaaagccccaatcccgatgtatcatccaccttcaaaaactctagaaagaactcctcgactcttggaatattactcgataaattgacacaacgcacaattaaagtcatttgttcttcatggctgacatccggggtacaatctaatattacagagaaatacttagcatccttgataaccctcataatataaactttcacagcctgagcaagaagggaaattagctcgttctgaatattgtggccgagatagtgatggtgaacttcatgattttgaatgcgtctaatgtggtcttgcatcacagaatcaaactcagcaaccatttcaattgtgcccagaaaattgccattgttatcttgataaagtttctcattggatcctcgaaaggccaaattatgtttagcaagaaacttcactgcagcaactattcttatcaaaacttgtctccaacgctctttctcctttgaaattccccgttgcaaatcatcatcaattgtctgattttggcttaacctcaacctaagttcattccaagtattcatgttttttatatgctccacactgttctcatgctgtttgagtcttccactgagatgcttccagtccttcaatccatcagaagctaacaaacttttgctctgatttgatttgaacagtttacagcaaaaacaatatactttgtccacatgcttagagtaaaccaaccattttctatcaatcacctcaccattgctcagctttctagagtagtaagcatacgaaaaatgtctaccactactatctgaagggaacagtagattgaattctctgataggccccttttcaattaatatatctctccccctgttgtcaagattttcccaagtcctaggatcatagatattctcatgtacatcaacatttgcattctcagtacaaggtgaacgctgcaaattttcatgttctgaatcatcatgattagcgtcatcttcagtatttacaaaaagaacaagttgctgctcttgttcttcagtactaggataatctgcctcaggattttcatcaggaacagcactacttgatgccgaaaagaacttatgtatagcacccttctgtgattcaataaactgatctcctcgttttctttttttccttttcttagcaccagataaatgctttttaggtaacattgcaaacctaaacgtacaaaggaaactgatctttagtatttactaattactaatgactgattaagtgattagtacttcactagttcaattcaatggacaatatggttacagcacagtagtatgcaagtacctgtaaattgaaacctgcagacactctggaagttgaggcagattcacgttgtgttgtgtcggcggtcgccggtcggccggtgtccaaggcgaacagtcgacagacaaaggcacaaagctgtgaagggctgaatgctgaagggatcgccggcggctcggcgtggggcgaacttgcgcaggcgccgtggagggcgctggaggcggattggcggagactgccgccggtagaggagaggagacgagaagacaaaagtttggaacttggacggtcgtgtatgcccaatgattcgatcagaaacttgtatacgtgcatatggtatacctaatacatacctaggtctgggcccctactttttctgggccctaggccatcgcacttcttgccgtggcccagagccggtcctgactatgtaattctaaaaaaaaaattaaggtgaacacacaccctcaaaattaacatgaaagggagtgcttggcagcctctacggacaccacacacgcatgcatgtgcaagttggttatctatcacatttggtgtgataagagtcaacttcatattagacgtacacattaaacatgcctatatgcctatatcagcagagaccatcgtaaaagctttatcaatcatagttaagcttaaaccgatatgcatatatccgaaaaaagaaaagccggcgatcgatcgagaaactagcagtgctaatcaccggaaaggtggtaaattaaagcagcaaagctagcctaataaagcgggacagatgcgcctgatgatgacgatgatttagcagtactagaattaagctagattgatctcttgctcctaataacaacagctcacatgggggatatgggagaggatgatagcgccagctcaacctctaccggcgccgtcccggccgtagagcgaaggaagaagaagaaggaggagaagaatcgtattgtgtgccaatcatgcgccgatggatgcgggggtctactacggtccccgacgagtaccttggtcagccagctctttttctctcttgtatcccccatccatcggcagcatcatgcagtcaggcagggaagtatccaaaagtgaacatttggagtaggccaagcacacacccacctacctacctagctaccaacctgcctgcctacttcagcactatagctaccttagctagcgatagaaagatcacactgatcatctccaggaatgcatgtactcctcctgtcatactgtcctaggttttaaaatatggagtaagtgttttttatttaaaaattatactacactaaaaacctatttttaacatgccatattttacttcatcgaaagcccgaaagaattattacccgcgtgtaaaaataagttgggggggggggggggcttgcgaggcacaacgatgatggcggcggctttggttttttagtgtttattaaacgattattaacacgcaagcagatctttacgtggaccgattgtgacaatgtgtttgcacatacggctgcggttatgcatgtggaaatgcaatactattgtgggcatttgattagagatggtcgaccgaaccatctgtgcaaacccattttgaccgtttacaaaaatacattttgtcatagtgctataatataattatttatttgcttattttctcatctcattcgatcacaaccatacaaatctcttattcaattattttcatctactttttttatctcaatcaatcacaaccatatatcttaattactgctaaaacttctagagatgctcgtaattttgaactaggggagctgaggatagatttgggatgttttagtgagttaaacgtgttcacattttagactattgatggagaactaatgaaaccactttgtttttagccaacaaactccatattctgcgatagtctatgacttggagctttgtcgaatggatcctacacgtctatcattcatgggatcgaaagcgaatggaaggccaaataaaacaagaacatgctgtgattaattagaaacctgtgactccatagtgcggtgtagggaaaaaaaaagggaagttactagggcataagtttcttcctcatctgtaaggctgtaaccggttccaattccaaatcatttgtcaatacgtggacactcacatgcaccatgcatgtcctttctagctaggataaacaccattatcatccgagctaattgtcactttattttttgtcagatgaaatatagtcgaaaatcaaagttagagcttgtgatgctatagtgaagcattagtcattatttttcatctaaaggcgaagagagatcatgacaggtgactttactggtaacagaaatctattttcattgacaactccattgctggtatggtcgtactggcccaaacgattgctacagcttattgggttgctaatataatatcaacatgctacttttcttgtcatttgcctactgattagaggtgtgagctagacaaagttttatcataagaaaatccagaaaatatcatcggcaaatgccctaatataagaaatgtcattgatagacccaacttcagtgaaataccatcatacaagtgcctttgtcccagaaatatactatcgccgttaggtttccgttaagtcctataaaaagactattttacccctagtaactgttaagagctgattaaaacttttgctctttctaccagcttacgctaatttgtaggttgctttccatactaaattattgtaagttgacagaaagaacaaacattttaatcaactttcaacaattcgtaggggtgaaatggtctttttatagtagttaacggagggttgctaacgaaaacctaacaatgatagcatttctggaaaaaaaaagtttgtacgatggcatttttaagaagttgagtttatcgatagcatttcttgtattggggcacttgttgatgatatttcttgaattttctctttatcttgctatttttgatcgagtcccatatgatagttgggtggtttagttaaaaaacaaaagatattaaggcagtgatcactgtaaaaattttatgaggttcagcagtacaattgggagaaaatattctcaacgaactctgaagttagttaaaggggtaccagagtacggctgatgcttcactttttttaacttcgtctgatgcttcattttggatggatatgttactctctctctctctctctctctctcaaattaggaatcgcatctttccagcaaaggagagaggagcacgacaacttacgagggcccaagattacgatcagtacgtactatcaactgttgctgctgttccagaaccttgcgattatatcactaatttttttcttctcaccccatgcatagctcgatcggttcagcgcatcgaccggccgatctgatccagttaagcatgcagatcgagcagagctgcagagacatttcggtcagctcgatgcatcgtcctgcgcatcaagcaatgattaaatttttgaatgattgtgatttttctcaagctctaccaatagccaactcaatcgataatcgatcgatgcatgccccagctatagcttttcctccattggaatgattaaagttctcctctcctttttcttttacaagtttatagattagtttttttattactacctttattccttcttctttctgtccgacaatatcgatatttatcctgattaagtcgatattgaagagagtcgatgatgaattattgtcgtggaattattaatttatatcaccttttctctgagttatctcccggcgattgtcggtcggggaatattgtttgtgtttactgatcacaccacacgtgaatcttgtccatttgtaggacgggaaagctgcaggttttggagaaaagattagtcagagtaaaacaaatttgtctgtctgttattgacttgttgggcgaagaatcgactccgcgaatcaagcctgattcacaacctctatataattaatttatcgatatatgcatatatcctattgttaaacagaggatgaaagaggagattccatgttcactatgttaagtgctaaaaattaaaggatctatatgcatgtttatgttcatgctacatctacattataacatgtagattaataagtatatatatatatatatatatatatatatatatatatatatatatatatatatatatatatatatatatatatatacatatatatggacagagagaaaagtttattcgtctcttaagggaatgccctctcattttgcatgtcgttgaaaaagttttaaaaattctaagaaaataaacttgtaaatcggatacgaacttgtgtgtttgtggagtaaaacatcatatattgttcatcatgtcaaaaaaaattttgatgatttttggagtgatatgtatgaaatgagggggatatcaccttgagcgacaaatatccatcttcgtttgttaaggttgttttatttgcttaagagatagtactacaattgtatttctagctagtttttcagttcttcgatcagttttctttcatcaaattgcaatcgttacttaattgatcctgaaaactaccaaaattgcaaatagctagaacgtatggggaatgcgtcacatgaacacagtatcacaattaatacgctagggatgtctccttcacagcccatacatagctgatcacagctaattaagcacacattatttggaataaatccaaattgcatgccggcttgcttgctggcttgcttaatcatcatatataccaataccttttcagatcgagacagttgctgctcgtacgccttctctcgtgaaaatccccttgttaagaaagacgtacgtactagcttgcacggcatgaatttaatcatggacatgatcaattgatcagaacaacaaacagtgagttagtttggtgtgttcatgtatgtatcaatgcatgtggctctcgtacgtaggtgatgtgtatatatgtatatgtttttagtattcaacaattcatggtacatacatacatacgcaagtagtatgagatttggctgtttgtttgggcatgcgtccaaagatagtataagtataggcgacattgacatgagtctctgcaagctaataataattaattaataatcttctgtctgctaactcatgcatgcatgtagtgttgtccgggtcccacgaggtttgtgatcaccaaccaatccatctgtagtgctaccaaacaccacatataccggtaacaaacactgaccagcacgttgcactgttgtactgatggcagcagcatctcctagtacatacagctactaattactgaactatcatgcatgcatgcagtacacatttagctatagctcctaacatgataattaattaagagtatccaaaggcaagacacatatagtaaacattgttatgcagattgagtggttgggttaattacaagaaaaatccaatatctgggggttgataaaataatgttgttaagttggatcaaacaactcaaaaccccagcccataggttacatgcaaattagttagttaactacaacaatttgctgaattattaacctcttaatttattcactaattgtccatgcatgcaacaaccaagccactatataggtcagtggaagagagaaggttatagcaaagcagcagcaactcaagtactcccaggtcaacaaggccaaaagggccagtgagtggctagcttaattagctaagctcatagtcatagcaatggctggagccgtgctggtgaggagaatggtggtggtggttgccattgccgccttggtggcgcccggcgaggtggcggcgcagctgacgccgacgtactacgacggcagctgcccgagcctgcagtccatcgtgaggtcggccatggcggccgccgtgcagcaagagccccgcatgggcgcctccatcctccgcctcttcttccacgactgcttcgtcaatgtaagtacaccatagctagctagctagcttgagagtggccagccatggcggctctgagaatgacggcggatggggatcgagctgatggtcgctcgccggcgttcatggcgattatatatgattgcaggggtgcgacgcgtcggtgctgctggacgactcgtcgacgatcaccggcgagaagaacgccgggccgaacgccaactcgctgcgcggattcgaggtcatcgactccatcaagtcgcaggtcgaggccgcctgccccggcaccgtctcctgcgccgacatcctcgccgtcgccgcccgcgacggcgtcaacctggtaattaatcaatttaccaaccaatttaattaataattacttttacacttgcatgcatgtcaatttttttttttaccgtgcggccgctcgccgacaggccgtacagccaactcaagctgcaaatgcaacgcactgcatcatgcccgtgtcaaaaagccacctacatttttaatgacgcacgcatgctcgcgccgcgcgacaaattacaatctagagccatccgcacatgccgtaccccctcagtctcaaaatattgtttacatgtaattcaaataaaaaaatttaactctaaatattttcgttacgaaatgcaaaagttaaatttggatttacatatttgtgggaatgatatatcatatattaatacatctgcttaattttttttaatttttttagaattatttgggtgacgtgcaaataaggaaggacataccctcaagagtttagaataatttcctgtccaatatctcactgccatgtgggccatcccctcccacgtccatgtacagttgatttgcgttgattttacttgcggctgcatgcatgacgaaaaatgattgacgctgatggatggatcgaccgatcgccttagcctgtcaatcttgtcgtgcatggggtgtcaagacctgcctaatcaccacaccaaattgtaactaaactaattttacagcggtaatcaactcgagagaagtaaaactaatttggtgcgtaaatttgatttgctgcagttgggtgggccgacgtgggcggtgcagctggggcggcgcgacacgcggacggcgagccagtcggcggcgaacagcaacctgccgtcgccgtcgtcgagcgcggcggcgctggtgtcggcgttcgcgtccaaggggctcgactcccgcgacatggtggcgctgtcgggcgcccacaccatcggcgccgcccggtgcgccaccttccgcgcccgcgtctacaacgacaccaacatcagccccgggttcgccgtccgccggcggcaggtgtgcccggcgagcggcggcgacggcaacctggcgccgctcgacgcgctcagctccgtccgcttcgacaacggctacttccgcaacctcatgggccgcttcggcctcctccactctgaccaggagctcttcaatggcgggcccgtcgactccatcgcgcagcagtacgccgccaatggcgccgccttctcccgcgacttcgtcaccgccgtcgtcaagatgggcaacatcagcccgctcaccggctccagcggcgaggtccgctccaactgccggaagcccaactaagctccggcgatctttgagattcgtgcccggtcgatcgatcgatcgatctttgagattcgtgcggagatcgatcgatcggacggtctggatggatggctagtcaactgccagctaggactaggggatggaggaggtggggcccagggatcagtgagacgtgtggctttttttggcgtgggaaggaagcgatcgagaatccaagggaccgaaataattaggtggagtggcgctgtcaaaaggggaggatcaagagggaggtggggcccacgctgcagtgacacaaagggctgcatgcattgcctttttttttttgttattttggtttggggttaattatcgcattcttttcctgtatcataatattggtggtgatcgatcgatcgatgcatttggtaataatttgagctgtaattttttttttttgtatatgtactaccccatgatgatgattgagaagatgactgattagtttgcaaggcatgcagatatgaataatggagacactagttcatgcatgcatcgtgcatgtggtgtgttttcctcaggatgcagacaagtcgtatataatgatcatccatgcatgcgcttatatatgggacaaatatgttactgtaactaggggaaaatgctattaccttcctaatatcgggacgaagaggtaatattgaataattatactcaatctaaaacgaacgcatgtgcataattattagaccaattaaccgtttatcatatacacgtatactcaaatacaaagatccattattcttttagtgtatcatataaactagctaggtgcctgggtggcccgcgcaactgcgtggttagcacccatacaaaattatatagtttttaatatggttttacttaaagtttattaaataggtatcttgttgtcttaagattttgaaagaccaaaccttatcatccccgtttttctaattttatagtttttatactcctatacggctcatccactgtctcttctatttcgtgtcattgggattttaaaaattggatataattattgtttgggtttttttatactttctaaaagtcccgtcaaaccatcagtggctttgccactatactcctctacggcttgcccggtgtctcccttctttattatcattgagaatttaaaatcaaacatgattatcattgggattttttttatttttagatgtctcgaacctttaaaaattggaccttgtaatttttagagtttattgtgtcgtggggtttcatttttctataaaatttcgaagtcacttcaaacgctgccactatactcctctacggcttatccgtcgtctactctttattatcattgggattctaaaagtcgaacataactatcgttggaattcattttttactttctatatgtcccgccaaccgtcggcggctctgccactatacccctgtacaacacgcccgctttttattgtcattgaaattttaaaaacgaatatgattatcatgagtgttttttttactttttagaagtcccgccaaccgccttgactggttgcttcacgtcttgcctgtcgttcctccttttaattgtaattaggattctatttagtgttttatcaatagtttttagatgtcccaccactactttactcctttataggcctattacttacttcctccgttttacaatgtaagtcattctagcatttcctacatccatattgatgttaatgaatctagacatatatatatatatatatatatatatatatatatatatatatatatatatatatatatatatatatatatatatatctatttagattcattaatatcaatatgaatgtggaaaatgttagaatgacttacattatgaaatggagggagtaattattctcgtcatgtgttttagatggtcctttctttcaatggtctttattatcttatcaccaattttagttatttataaattgtattcctagttgaaatcttatttttcttttctaatttcagaatttattttattttttattttgaattttaattaatattgcattgtgttcttttaatatttttattttttattttttattttcagtttcacttgtttcaaaattgtattcctacttgaactttttttattttctttttctaattttaatttttaattaatctcgtattgggtttttatatagacttttatttcaatatttcttaattttaattctgaatttcagttatttttaattgtatttctacttgaactcttcttttttttttggctaatttcatattttattttattttttattttgaatattaattaatctcatattaaattcttatatgatctcttctttcaatagtgcttatttttaattccgaatttcggctatttttgaactgtatttctacttggattcttcttttctttttctttgattaatgtggaaatttttagcacccacaacaaacatggtgcattctttcaaacctgtcttaataatataatagataatatagtgcatgtcgtctgtctctgtttttaataagtttcactgggtactgttcattttcaaactttgactgcttttttttaaagaaaacatataaattcttcaaagtattccgtattagtgaaggagtgttgcatcctatatatgtagtcataaaactttctgatgttatggagcccggccggtataatccattcaactggcctagctagactagattatatcttgaagctcaattcctaggttcaaccagcacacaccacatgcacatgatttagaagccttggactcaaggaaacacaaattaattcttagcttcgttggtgatggaacacaaagtgcgatcgaatagcagattgattagacgccgtacatgatggctaaacaacctctaatgctcactctaccgccatatgcatgaatcatcattccatctccttgttggttgtagataaaaaaagaatatggagcctatttatgatatgggtgtaaccgaaccaactcaaccctgccgaatggaagacaagtgccacaacgcatgagtggtgggaaatgttagccaacagccaggaacacccaaaaggagagtgcacaatggcttgggagatttggagggagtgaaaccaaaaagtctttcagtaaaataagctcttagcaataagcctattgctagattcaaagaagagggatgttatggtcactcataaggggcaaagctcttcaactagttagcccacatgaatgtatagtcttgtatagatacacttgtctctaatgttgtactcaaactctccttatttaatgaaattgacacaatgtcttgcatgtatttttttttcaaagaaattttcgtacatcataagctaaccaattagagtttattgatggtcaatgttcaaattatacttatcaatatcgatagttatttgaaatcagagagagtacatatctacattcgtttaatcacagtaaacctgagacaggggtaaggaagctgtgataaagcccaacctagttatagagaaagaaatttacaatgctccatccggattgtaatttgcaacattgcgagaccacctaattatatcagataacacacggataatggcgaaagacatatataaatacgacctaatataagataacacacggatagtgacgatagacagaaggacatcgatcgcagatcgaaggcaactatgcgagggaggacagaccaaccatgacagtggtcggagatggggaggagggtgtagcggtggtatcaagtgaggagggagcagaaggcagcatctagtgatgatgatgtgagagagagggagagcgcgcgcgcgagcggtacatggcattgtgtcaatgatgtcgattaagatgaaaatcaagtgaaagaggatgaattgaatccaatgcaggtaagggcatatatgtgttttagtttattatttagggttaatttgctttgtaaaatctgaagtataatagattagaaaaatatgcaagcattaaaacaatgccgcctggggaagagcgtgttgccggttttcctcacccaatcgagaaacccctatgcataaaaggacaacgtggcagccatcccgaggagaaaaaaaattcaaaattctaagaaaatcggtaggagtagagcttttattaattgatgataggtagaagaaaagagggttgaaatataatattatgagggccctttaaaaccaccgtacattggagaggtgccaaatgggcaccttaacagtgacttcaatccatgcatatatatagatggcaaaccttctctcgtttgagatagataaagatcaagactaaacttagaaaaaataaagcacacaaaacggaaaagtaatagtgtattattaaatgagttctaattattataattttagaaaatgggtttatttattattctaaataatttttatatagaaagtttttaaacgaaacacaccgtttaccagtttgaaaagtgtgctaacgaaaattatgataaaatatatatattaatttaataaaaaataatgaacggggctagattgcaagctgtccaatactgtggctgcacgtgtttttgaccgatatttgcaaattaaatccagtgatcgacgtcttagggtgtgtttagatccctcggcaaaatttttcactctgtcacatcgaatatttggacgcgtgtatagagtattaaattaaacgaataaaataattaattacacagattgcgtataaattgcgatacgaatcttttaagtctaattgcgtcatgatttgacaatgtggtgctatagtaaacatttgctagtgacggattaactaggcttaataaattcgtctcgcggttcacaggtggaatatgtaatttgttttgtaattagtctatgtttaatacttcaaatgtatttctgtatgtccgatgtgacacgccaaaactttacacctatagatctatgcccctgtttagatccaaccctaaaatttttcaccctgtcacatcaaacgtttgaacatcttcatgaaatattaaatataggctaaaaaataactaatttcacagtttgcgattattttgcgagacgaatcttttaagcctaattgctccatgatttgataatgtggtgctacagtaaatatttgctaataacggactaattaggttcaataaattcgtctcgcggttttctcacagattatgtaattagtttttttattagtgcccgaaaccccatataacaccctatatagtactcgatgtgataatttttgcatttttaggtatcaaaataaacaaaacccatcctagtggatttgccaaaaccttatccctgaatgtaaacaccctcttattatgaaaatcaaaatgaaccagcactagctactactctagctaggtagtgcaggttctagggtctggacacgtactggcagtacagcatgcacggctgcacccaatgtcccagctgcaggctgcagccgtacagggcttcccagccgacacgatccgggaaatggtaaactttgtttcaaaactaaccctatcaattaagtaatgactttatcaaaatttgacgaggtaatctaaaacatggccaaaatttacctccattatcaagttttgataattctaaaagttcctctcacaaaatcttaataatggtaacaaactaaacataacttccacttctcaactttaccaaatacaatatcaatatttgataacattgatttagacattaaagtgaacagccccttaattatctttcgtcctctttccggaagaataatactccatctacataactctgccagtctgccttgcaaaactaaagcacttggaacagattcctctctgcaaacagcggaacagagcacccaaacagcagaaagggagtacagacacgcaccaaaccaatgaagcagccgcttctcctgcgatcgacacgaagagagatcggtacagctcatgcgcataattccctcgcccaggacagcattaggttgcgaagcagcagtacgcgaacacacacatgcagtagcacccgcaccgtaggctgcagcgatcgaatagcagtgcagttccatgaattccaaggttggtggcgaactcccgatcgccggaacgctggccggacaggcgtttggtggatccattccatcgcattttgcatatcttcgcgtaatcttagctgtagccctgtacttggagtatgtatgttttctggtcatacctgatcattatttgctaataaatattattagccataccttacaaagactaagaaaatcttgtcatatttttttaaattcattaatatgtgagatctaatttattggaaagataatcttgtgataactataagtacaactaaacagccaacaaggtgatcaaacttatcaaactatggtaaaatatggttaacaaacaaacactcacaaaggtcgttctgaagtgtggcaaactctgccacacttttcatattgttgtcggcatcacggactcatgtacgtatattgtacagaatgcatgaatgtaatggaataagtctatttggcctccctcatgtcttgttgttggtcaaatcgtatccctcaaccgtaaaacagggtacaaattaatttctttggtagttttaaaagtggtttttgctgacgtaacacgttgacttggtccaagtatgtgtgggtgtgtgcgcgcactcgacaatgacatccaggtgaccagtttatcgctgccgtgggacatgtcgtcattggtgcatcctggtgagagagaggggagagagagtggggagggaggcgaggtgaggaagataagatttggatgatacgtggatcccacccgctgacttagctagtcaattgcggtcaatatatcacgtcagctaaaatcaccttctaaaacacctaaggagatgatttgcaccgatgtttaaacacggggaggtgttatacccggttttgtgttagacggaggcgattcagtcatgaccaagactgaggagaaattatagacttaatctgaatgttattgactgctatctccgtccagcccatcgaagaccctgttagttccaattgttatatgggccaaaatgggcccaagaaaatcctcctcctttttcagcgtaaccataaccctccgcgaaagcagccagctaacccaatgtgacgcgcgtagcgcaactgtagagcgtgtgcgcaaccatctcgcacgcacttgactgacagccactctccgccgaaccccaccaccatgccgctgccaccccatggtgggctccctcccgcacccatcatcgccaccgccaccgccacgcgcgccgaattcgccgcccacttccaccacaccaccatgcgatgcaacaaccggtgggcgcgccgcgcgcagctctcgcggttaaattctcccaacacctgcgcacggcgcacaacccaacgccggcccgccaagactacggacgaacgttcgtccatccaccacggccctcggagggcacacgacgctgacgctggatccgacggagtcgggtgatatagattgattggttactgtttcacaagttcacaacttgtttcgatgcttaaaagttcgtaaagcgaaataattgcacctaatagataaactaattagcaacatgtggcttgggcaaaaaacattagtacaaaggatagggaatcttttgccaaaaaaccaaacaatattgtcaaaatttttgccaggaacaggagccccttggcagcaaccggaacacaccggcttttgagcctctatcaacggtatcgattaatcacccttatcgtctttggttccttctgcttgcttctcttgctggttcgtcggtcggtggagtttgagcctgcgccatggctgtcggcgggagagggagacggccgctgctcctgctcctgctcctcctcgccgtggcgctggcgctggcggcgcgcgcgcgggcgcagctgtcgccggggttctactcggcgagctgccccaccgtgcacggcgtcgtgcggcaggtcatgtcgcaggccgtcatgaacgacacgcgcgccggcgccgccgtcctccgcctcttctaccacgactgcttcgtcggcgtaaggaccgcgccgctcgccgccgtccggacgaacacatgctgcctcttctccgcgcactgctaagctttgattttgtgttgtggggttggggttcacagggctgcgacgcgtcggtgctcctcgacgacacccccgcggcgcccggcgagaagggcgtcggccccaacgccgtcggctcgacgaccgtcttcgacctcgtcgacaccatcaaggcccaggtcgaggccgtctgccccgccaccgtctcctgcgccgacgtcctcgccatcgccgcgcgcgacagcgtcaacctggtcagtcacacacactccacacacacacgcgcgcgcgcgcgcgccatgtgttcgacgcaatgacgcaaaccctgttgtgcgcacgtgtgcagctcggcgggccgagctgggcggtgccgctcggccgccgcgacgcgctgtcgccgagtcggagcgcggtgtcgaccgacctcccgggccccgaggccgacatctccgcgctcgtctccgccttcgccgccaagggcctgagctcgcgcgacctcgccgcgctgtccggcgcgcacaccgtcggccgcgccagctgcgtcaacttccgcacccgcgtctactgcgacgccaacgtgagcccggcgttcgcgtcgcaccagcggcagtcctgcccggcgtccggcggcgacgccgcgctggcgccgctggactccctgacccccgacgcgttcgacaacggctactaccgcaacctcgtcgccggcgccgggctgctgcactccgaccaggagctgttcaacaacgggccggtggactcggtggtgcagctgtacagctccaacgccgccgccttctcgtcggacttcgccgcgtccatgatcaggctcgggaacatcggcccgttgaccgggtcaaccggcgaggtcaggctcaactgcaggaaagtgaattcctgatcgatactactagatagcattgccgcgcgcaaattgttcatagtacaaagtttaaagttatataatcagctgtcaatttcatgtattaagtgaattatgacataagaatgcaatagaaatgtcccaattttagacatcaatcactagtggataattcttccgtttgttcaattaattaaaccttgcttaattcagctaccatgtaactattgcgacggctatgatttttgcaatgaacacaagaactttacccgattgttactagtagtgatgttactgtgatagtactactgctgatcactatcacagtagtatcagtagacttgacaaatgcgtagcaacaaatcactggaaaaaaattcacatgatgtgttttgtgtagtcctgaatagtgagcggtgtggtcgtgactcgtgagtgatcagtttctgctcgtgatggaagaatattggcctactatatgtcgttttgggaagatacagaaaggaattcgatggatacaatagcaagagcgaccaaaaaatccggcaaaaatgcatacgtcgactccgtccggaacgatgtggttttgtggatggatctgaagatgttacgaaagggactaatcaaccaaccaacttggtgagcttgtctgtgtagcttacctgggcttgattggagaaagaaaaattttcgaaatcatgaggaggcatgacctgtttctcataaagtggtttctctaatgcatctgaattttgaacatgttcttttccattttaatagttgaagaacattctctgcgctcaacttatcggtggtgcgcatgtatccttctttacaatattttcagttgcagcttatgatattattttataaaacagaagatgacctcaatgataaaaaaaaaagctagttgttatccatatatatgcgttgaagagctccatgataccacttgctctaaagagtggctcctaccaacggataaaatcgaaagcccctctgctaattgctaaagcaatgaccaaaattgcagacaattggagcacatgaagttggcctacgatggattatgtcgatgttcatatgagatgtcgtataattatatactaagatttggtaggatccatcatgtatcaagtccggtatggcaaaaaaaaaatcctggataagaaaagatcagcaaatttctactcaggcattacaagggatcatctctatatttatctccctaattctacttggataagaaaacatctgaggatataaaagacccgcaagcaaataccaaaagatataccaagacaaacccaaacaaagcctacacgatccacaagtgccaaaaaaagccaatagggatctataacagcctctcaatctcgtcgagttcttatttgagaaatccaatggctactagctagccatcgaccacctactcgagctttacgctgctagactgacagagactcgattagattctcctctctattgtacttatgagcgattgattatataatgataacaccggtttcgatcaataggagttgggctattacccgttaaatccctgtttcccgtctttttgttgcaatctcatgtatgccttcataccaatgtccccattacattacaaataccaaagtcaggtacatcacatcaacatattacttattaacttttactttataaaaaaaacactgatattattatatgaccaatcgaatcaaagtaaacaatgtgcaaccactaccaacacttgcatttgcaaaataaattactgaattactagttacccaattaaccaaattttggtacaattcttttcaactactttatcgaattattgggtccacacctctaaaaatatatttttcttaactactttcttctatcgaattgtttagactattagttcactttatttcttaaaatatttgatttatccatacaatcagaaaatcagcggtaataattctacgaataatccgttccaaaattttcaattgaccatgcatcacgaaaagtagaacaagaggtaaatggttagaaaaaccacagcttatgttatctccccgatttcttttagcatgcacgaccaaattggatttatacgtgtagaagaattataacaaccaattgaaatacagactagaagaaacatctttatttgttgggctaagttccctcctcatgtaccattattcccagcctattacagctcaaaagtctaacaaatgtgagccattgaacaatgaattgatcaatggtggagatctcatccttttgtgatggaaagaaaaacccaagagagtgtgtgtgagctgcaacatccattggatatgagaagcaactagtaaaacacaagagaggaagaggagactggagatgaagagttgcattttgttctgcttttaccctatcttcgttgagttaacgattagaggctcaaatgtggtcggatttgcaccaaacttggtgagtttgttcctaacttggagcacctgatttgagtagtggcttgtcaggtcgagtgcctgcagtttcagcttgtgctgcatttggtagaatgtaagtttgaggggtcaaacgatgttcgattgggctaattttaggacagctcatttttgccatgtttcatgcaatttgcttctatggtttggaagatatcagctgagaaccgaaggggacataatccattatttctcttcttcctgctgttatacctcttattagttgtcatggttgatattggtgatgccaagtatgtaatttgatgatacaattgttgttatgatttgtctctagatgttttagagaagacttcatttgtatccattgtttattatagtagaagcctagagtggatcgttggttccgtggtgttttactcctcacatcgaggagttttttcctcgtaaatcatcgtgttttgtgtacatgtgtttattgttgtttcgctactgatttgctagttgaaactatatatcctcaaagttagtggcaagatgaaagattgattgtgtgaaatatatttatcagttggtgaattgttgttttgaacattgaaatttatttggttcaaccccaacattatttcaaaggccactgcataaacacacgtgggcccgttcttatcccagttagtactatcgtttgtgaattcggaatcctattttgttcgcgcttcctgcacgacaagtcctattatgttttttatgagaccgtgtctgttttgtttctaggattccaatgtatattcccttaattccaccatttagtgttatgcgattctagaaatcggggtgaggcgatcgtgatgtaataatcagccatgcaaccaatgtcacgagccataacgctcaaagattaaacatacaagatgtcacgattgtaactaagtagtagtttttttcgttacaaagcacgggcactctttctagtaatataaaatctattaacttattaatggaatagaaaaaagagcctccatgttcgttctcacggtctagaaattctcatattaatcggagaaaaagaaaaacagagtccatatagaaatacaatttagaaatagttgaaattcggaattaaaaaacaaggaatattggaagaggagaagtccatataaaaatacaattaacaaataatagaaattcggaaataaaaataaggaatattagaagcagagtatagagtccatatagaaatacaattaagaaataatagaaattcggaattaaaaataaggaatattagaagtatagtatagagtccatatagaaatacaattaagaaataatagaaattcggaattaaaaataaggaatattagaagtagagtatagtatccatatagaaatacaattaagaaataatagaaattcaaaattaaaaataaggaatattacaggtagagtatagagtccatatagaaatacaattaagaaataatagaaattcggaattaaaaataaggaatattagaagtagagtatagtgtccatatagaaatacaattaagaattaatagaaattcagaattaaaaataaggaatattagaattagagtaaaaaggagtctccgtgttcgctctcatggcctaaaattctcatattaatcgaagaaaaagaaaaacatagtccatatagaaatacaattaagaaataatagaaattcgaaattaaaaataaggaacattagaagtagagtatagagtccatatagaaattcggaattaaaaataaggaatattagaagtagagtatagagtccatatagaaatacaattaagaattaatagaaattcgaaattaaaaataagaaatattagaagtagagtatagagtctatatatgaatttaaaactaactaaaattcggaataaacataataaaattaaaagtaaagtttagagttcgtataaaaatacaatttacaaataactaaaatttgaaattaaaaaaaatacatggaaagaagtgtctaaagtcaatataggaatacaatttagaagtaactgaaattcaaaattaaaaattaaagaatattgaaagatgagtttggagtctacatagaaatccaattagaaataataaaaattcagaattaaaaataaataatattggaagaagagcctagagtctatatagaaatacaatttacagctaacgaaaatttggaattaaaaaaagaacatataggaatataggaatataatttacaaataactaaaatttgatattaaaaataattaataaccaacacgtatataaaatacaatatgaatattacacattagtagtttcgtaaagttagtacaaaatttaaaattatgttgtcatttaatatattggaataatacgttgagaaaacatatatgttattatataagagaaaatataatgatgttagcgcgggccactatactggttactataatttaaaatgcttaaaacttaacaatagtattatacgtcaaagaggtaacctcacaatcaaatgaaaaagtaactacacatatgattcagaaccaaccaaataataccttatatacataggagcatttacactataccactgtggctgtatacacggtgtagaagccgggttttatatatttctattatctaaaaaaaatttacactataccagccaacggacgtctcatgctattcagtctggtcttggttgatctaggtacggacagccaaacagacccaattgtatcgagctagccagggcaaacccaaactgagaatcagagaggtatgagcagatcgggcagtcgaccaagcaaagcccatgagcagattcgaaaactttcaagtctagatttgaaaaaattgaaaattttcgacttagattcgaaaattttcactcgagatttaaaaatttgctagatttgaaaattttcaagtcaatattttaaaactttcaactcaatacatataaaaaacacgtgtgctaaaagattaaagaaagtataatatgaaaaaagcgcaaaaaaaagaaaagaaaacacgaaaagaaaaaacagaagagaaaacggaaaaaccggcgccagcggaaaaaaaattctagcgcgcgtgcgtgggccttatgggccgggatagcaaaaccggcgcgggtatgcggctgcccggattgatgcatattggcggttggcgcaacagcttcgcgcgcgtaaaccgcgtctcgactaccgagcgagccccaacggaatacggacgccatgatcaactcttgggatatctccgcctcggcgcgccaacgccaccatccaggcatccatccatccatccccctgcgcggcgcgtagccacagctcgatcggccgccttccggccatctcgtctcgtgcgcgcacagcagcacagtcgtcgtcgtggatcggtggatgaggaggaaaccttcgctcgcgcgcagcctctcgcgacgtcggcgcgtcgtacgtgccggaacttgctcgcgctgcggctgcgcagccagccacgacggttcatcggttcgttcatgagcgaatcccatgcgcaacgcaataatgagaatatgagatcgatcgtcacggtcacaggctgctgcaacaaacaaacaaaccctctgtttgcgcctacattatcaggggcttgtgcaattgtgaatgccaaactgccaactacatatgttgccgttctgcaccggctgacccatgacgtaactccatgaggccgtgaccaaaggcccaaatactgatcgagttttatggtccaaacaagcccactttacctggacatggcgtgacgatgccatgaccatatttaagggccttttgagagcttttagccggtgcagcttctcctaaaaatcaaaagctcctctaaacggttcagcttttggtccaaattttaagaagctgtagttataaaatccagaaaataaattagaagacagaagctgggaaacccagcttttccatattctcataagctgattctcagaaggtggctaccaaccaactgcatctcacatctcataatcttaagctcctcaaataggctctaagcctcatctctagtgcaagagaccacggttgccttggatgtttttttttttgaaatgaggttgccttggaggttagagtatcttcaaaagagtagttaaatagctctctaagctaaattttaataagtacaaaaaaaaatcctttaacagcccctccaaccggttggccaagccattcggctggccaaatctgacaattgcacactcgctgagtaacaggtggccccatacatcttcgttcctaattccttctctctctcctccagaatccttcattgttgttgacctttagcatcgaccaacatacctctagcgccattcatcaactacacctcactctctggcgcgtctgcctcaccttcccattgacgcggtgcccatattcaaatgcggagcaaaggacgataacggagtagcagttggcgcaaggtgccaaatcggcaaccctagggggggggaggcgaggatctaactgtttgatgaggatggcccatccaccaacggtggtgacccccattagtcggctcgccggtgttgcaatcgccccacctcttggctagtaccctagtgtctgtcgtcgtcgctgtgcctgcccaaacgtggagagaggtggatgggatgggtagggagagaaggaggaagaagcacatagatgttgttaaattgaaaagtgtaatagaaaggttgttgacgtgaaaggtaaatttaactctctattttttagcaagctagttaaatagatatttgaagaagtcagatggagatgctcaaacatagttgattggcactggcacacggcatgtgttcgctcgaacctacacttgatgagtcgccacaaggaaaacgcaacagcagcactagtgctaacttgttactactacgacaaaagcagatagagccggaaatggagtagaagcaaagaaaacaccacccgatctcttagccttagctcagctcgtcacgttcacgtcccaaccccaagtcattactacaccacacctcatcaacatgtacactcctatgtaggtcagcagcttggctcgctcgcgtcggacgccagatcgatccatccatcgataaaccgagcacaagagcagcccacgacgcgacccattccgcgtgcggtcaaccgaccgcagccatggccagctgcctccttccctcctcccatgcccccctacaataaatgctttcccgccactacaaataccaccacctcgatcgtcgccgccgcgcgccaccccgacgcggcacgccaagttctccgcgacaatggcggcaatgtctgcttcgggccggagggtcttcttgctcggtgcccttctgctcgtcgccgtctcctgccatggcggctttggcggcgtcggcgtggcggagggtttgtcgacgaggtactatgctaagacgtgccccgccgtggagtccgtcgttcggtcggtgatggcgcgggcggtggcggcggaccggcgcatgggcgcgtccgtgctcaggctcttcttccacgactgcttcgtgaacggctgcgacgggtccgtcctgctcgacgacgcgccgccggggttcaccggggagaagggcgccggcgcgaacgccggctccgcgcgcgggttcgaggtggtggacgcggcgaaggcgcgggtggaggcggcgtgccgcgccaccgtgtcgtgcgccgacgtgctcgcgctcgccgcgcgcgacgccgtggcgctcctcggcgggacgacgtggcccgtgaggctgggacggaaggacgcccgcacggcgagccaggccgcggcgaacggcaacctccccggtccggtgtcaagcctcacctcgctgctcgccacgttcgccgccaagggcctttcggcgcgcgacatgacggcgctgtcgggcgcgcacacggtggggcgcgcccggtgcgccacgttccgcggccgcgtcaacggcggcgacgccaacgtgaacgccaccttcgccgcccagctccggcgcctgtgccccgcgggcaccggcggcgacggcaacctcgcgccgctggacgccgagacgcccgacgtgttcgacaacggctacttccgcgagctgacgaagcagcgcgggctgctgcactcggaccaggagctgttcgccgccggcggcggcggcaggtcgtcgtcgcaggacgcgctggtgcggaagtacgccggcaacggggcgaagttcgcgagggacttcgccaaggcgatggtgaagatggggaacctcgcgccggccgccgggacgccggtggaggtcaggctcaactgccggaagcccaactagacacacactaattacatgtaactaaacagtacactaggacatggttacgattaaattaaaccatatatatatatatatatatatatatatatatatatatatatatatatatatatatatatatatatatatactacaaacatatagttcgtcgttaatttgtatacgtaaatttatatatattctgttgatttgttgtttgtacttgacatcaacttttgatcgggacgcgtcggtcgcgtggggggccaaagcttgggtctgcattctgcaattagacacgtaccactactacagggtcgcgcgttgcggctcgcggacagctaatgtcggcggcgtacgggggaatgcatcgatctgcatggcatcacggagacacacgtacgtcgtggcccgtgtcgcaggctcgcagcgcatcgcatcgcatcacacggctgtcgcgggtgcgggcggctgggcggtgggaggggttgaggtcggtcggcctcggcaagggaaaaccgcgtgaagggggagtacgcgcgcggctggatcaaaataggttggggtttgtacggcccggtcagggagtttcttgcttggaagaaaaagtccattttgaattcatataggagccaaatctgattcactattaaaatcgtgcaaaaggaacgagtttggatttatatagttgtagcttcaaatgcaatgttactgtacacacattgtatttaagtacattgtatttgggtgtgtgtgtttgagagtgggggaaagaagaagcttgagaagataggtaaaacaagatgaaccattattgtgattaattgagtattaactatttttaacttgaaaaatagattaatgtgatttctcaaaacatcttttatatgtatatattttttaaaaatatcatttaacagttcaggtagtgtgtgcgtgaaatacaaaagagtttttgggcctcatattttcgcttattcttatacttatcagccaaatcttaaattttcaaccttaaatacgaagctgattttaaggtttttttttatcgaagtttatttttcagccttcgcttttagatcgctaagaacacgtatataaaagttttattcacaaattatttttcgtttgcaaatatgtcgtttcgcttattccgcgaataagcgaaacgatggctccatttctctctgccctgccaaacgcagcctaatatatatgtgtgttaatgtatcaagaccttttcagtcttttcttaccctcttgtacagcctagcagtgaacaggttcaatctccaaaaagtcatctcttctcccaattcccaaaagttaacaatcatgccaccagatagatatatgcggtctgcttgtcaagagagctaccattcatttacgctgaacaaaaagagtgaaacatgcacatgcatggagagcattatatagtttttattccattctagttctttttcagttctttcctcgcctcacgtaggaaaacaaaggcgaaaaaagttcttcacaaagttgcatcgatcacttgttcttttttctgttctcgatcggttgatctggagatctagtagctaactgatcaatttcagacttgctatccacacttgtgcatctcgacctcttaagttggaaaatagctactaatttatcaccattttgctcaggtgtttatgcgtgtaagatatgggattcaagcacaacgtgcccttccatgtccgtagatgaaccttgcatcatcctcggtgtacacatgcgtctcattcaacagcctgcgagtattattttttcaaggaaaaagaaaagaaattacagttcagtcagtgcaatgttctgaatatcttttcacttaagcatcgatgccacctgcatctttcacgtgttgctgaaaataagtatagtagtttttttttacagtgatctttactgatagttacttacgactggtaaacgctcttgttcaatatggtagaggaaatgagggactccccactcaagtacaccagctccccatctatcctctccttgatcctctcattgatttgctgagcattcatgctaaatggataatctgatgcctacatacaaaaggaataataggaagaagaatagcaacggattaattaattgatgctagcagaaaggaaaaccatctaaaaagaatagaaagggaactgaacttttcagtaagtaatattgtaataaggtggctagctacataccatgacccagccccaggtgtcagcaaaggatggcacatgagcagtgtatgctttgacatctgtggtatgatatgattaacaaatgcatcatcagaatcacaaaaacaaaatcaccccatgcatatagcaaaaaatataattaagggagtctttaattgctgggctactcacacttgaagacatgcctgagggtgttgtagatggaggagaagacctccttgtgggtcagaacgccggctggccctgcctgtcaacagccaaaacaactgtcagtaaaaacgctaaaatttcagagaagttcagagttcagtcaaataactaggcaaagagttgatgaaaaattatatacgtacctgggtgacgaagacgccgcggtcgttgagcttgggcttgacgatgtgttggtagaatgacttggtgtagagctggtagcaggggcccccctccactgggtcagccaagtctcccactatcacgtcgaacttctccctactcttctccagctccgccctgcatgcaaatgcatataagcacacaccgatcaagaaaacatacatacacatgaatacatgatgctgattcattttcagtttgcagcattaatatggtcgttcttttttccagattaagatacagattttatctcgattttcattaacacgcttttaaattgttaagtggtatattttgtacgaaaactttatacgtagaaattattttaaaatatcagataaatctatttttcaactttataatatttaaaactcaattaatcacatgttaatagtttgtttcatactctaattttatcgtcatctttaatagagaacactagtatgtccacctgaccaccttctatatatgatttggtacatacctggcgtcgttgatgatgaggcagagcttgtcgctggcgaaggcgtcccagttgacggtcaggtacgtccggcagaagtccaccacctcctgcttaatataattatcatcacgcacccacgcatatgcgttcattcagagaaacaaaacaacagtttaatttaagaatctattacttcctccgtttttatattataagactttctagtattgttcacattcatatatatatatatatatatatatatatatatatatatatatatatatatatatatatatatatatatatatatatatatatatatatgttaatgaatctagacatataaaatcttataatctgaaacggaggtagtactgcatatatatcaatcaacggtgcaatctagatcgatcatcgagtacctggtcgatgtcgcacatgacgaccctgtggacggtgttgtgccggagcacctccctcgccgcggaaccctcgccgcctcccatgatgaacaccgtctttgggctgcacgtactcaccttcgagagattagaatctattttattatatatacttacatgtctaaagaatctggattagtgtttgactagaataggaggtagtcgttaatatatttcgagatgaaggaagcagctgtgagatcattgattgcgcgatggtaatttaacgtacttgggatggaagaggaggggagggtgtatgagggactcatggtagatgaactcgtccacctctgtactctgcatcttcccatcgattattagagcctggtagaaaaagggtgttcccatcgattattagagcctggtagaaaaagggtgtcatatcagtgttctagttacttactctcttcatttttaaaaatagcaaactagtactaaaatatatttttctaactagtattaggttaatatattttaaaacgaagggagtactaaattacaccacacaagttggtgttacgaaacaagaatagaaatgatatataggacttctgtgtttctttttttttaaaaaaaagaaagaaaaaagagaggcagaaatggacagataccttgccaaaatgctttgtatcaatgagagcgatctcctggtacttgcttgctccccggtgcaacacactttcacatcaccagaaaattaggcaaagcacatcatctctcacatggcaacaaaatgcatagattgaaagagacacctatatatcttgttaattactcaatttagtactccgattactgaaattataagtttctacatttgtaggcattgtcctgggacctctatctgaaatttttgctttattttgacagtcaacgataacacaaactctttgtgatgcacgcatgatagtaataattaatatacaggtactccatcgttttagattataagtcatttcaactttggttaaaatcaagctacttcaagtttaactaggtttgtagataaatatagtaatatttacaatgccaaattagtttcattaaatcaataattaaatatattttcataatatatttgtcttgagttaaaaatgttactacttttttctacaaatttaattaaagttgaagcagtttgactttgataaaaatcaaaacgatttataatctgaaacggagggagtagtataaattaatttacctgttgagagcgtagcagagcttgaggtcgtcgtcgatctcctcctcgtaccacttgctctcctcctccctctgctgctgcttcggcgccatggacgacctgtcatacccgctcataacctcgaatcctccgttcatctcacgcactatcccttcctgcacggccccaaccatctttgctcttgccgctagctctctcaagctaaactatcagcagcagcagcagcaagctatagctaagatcaaagacgcaaatgcaatattttcaagtttagtcaggctagctcgatctctctctctctgaacttggacttgcacttgcacagttgcacttggtatctagcagagatagcgatatgtgtggcagtgaggcgcaatggttcataggagtatatatataggggcaatgcaatgcaatgcaaagcaaggaggccggcaagctgctgtggaggaagtggacacaggaggcgacaaaaacaaatccggctggggaagcacagtgatgacagaaacaaatactaataaaggagtcgcatgcggcatgatggcgacggcagtgctcagatcctctgcctcgaaatcctcctagcttactccaggttgagtagccacagtcccatagagcttcttttctgacctgaccagcttctgcttctgcgtctcggattaactgaagagctccttagagcaggtacaataagcagactataagccagctgtaaatatattttaaaaagttaaaataggagagagaagagcagtaggcaacagatatgtagtcagctgcagcacggactctaagacgtaatgtgtgtatgacaggtgggaccatgtattaatagtatagtaaacaactattgtatgagttggctattaaattggctataaatggtttggagctagtagttggctatactgttaaccttgctcttagctacattatggcattaacatcagatgaaagattgtcttggttatacacacacactctctctctctctctcaaattgtttcttaacttttggtaactgctgatctccttggtcgtaaatatttggcgttcacaaatgattcggttaaacttttcaagcctttgaccatcagtagcctctcaaatgctaatttttcataaaacaaaaacatcatgcatatatttgcctggaaagttattatctttatcaaagaatcttttataaaagggcagaaagttaatgcatttcactatagagttcataaggaaaattaggaaaaaaaacttactagtagcatgattaattaacgaaaacctccaccaacaaatgaaaacaccaactccatcaaaagatgtcacgggtttctcccgcacatcaccaaataccctaagcaagcgaatcgggatgggccaaggtgatacatgtaagtagaaaactccaacaaaatgacattttgtgatctaaaatagatctaggtacacacccaaacaactcccctaagtcggaaggaggtaaaaacgccatagcaacgtgtccaatgagatgaacagtgcctacaaaaatcatactggtaccaacaagccaaacaatgcttttgtctaaaacgcttacccaaccaccaaacccatgaggaaagtcaccaattttttgtctcacaccccatgttggttaacatggccaccactgtcaacaccatgctagaagagcattaacaaccacgaccacagcttctatatcaccacaacaacattggcttcacaaatgtcattgttgccaagctcaatgaccaatgcaacaactccgactcctcgtagcaggtcacacccaacacaaggcatcatttgcaaccatgcacaatcatagaatgaaacaacatatcccttactaattgttgtgtagccacaccacttgacactatttgcgcactaggggccaggtttgttcctagccactagtcgctaaaccactgatgtaaatgtttgactattcttgtccaagctgacatccaccaccgtaccatgtcacggagctccccacatccagatctggaagccagggttcactatatcggcttagggcttttgatcgggggtcaccgaaatcccgaaattttgaaaatttcggtccaaaattttcgaaaatttgaacaaaatttagttgaatttgaacaaatattacccaaattcatgaaaaaattgaaaaatttcggccgaagtaatatcgtatcggaggggaccgaaatgacagaaatttccaaccctgctggaagcagaccaaccttagaagaggaagagcttcatggaggaagtggaatgagcgaagagtggcaacaaccccggcatagagtgtcatcccactagcccatgccaccacatggtgttatcccacatagagtgtttctgtgattccgcgtagtactgtcagtaccgccgaacaaccatcgtttgtccaacctcttcatgtagctttgctgggaagcccttgtgcaacgaattgtacttcgaccgccaacaccctacttgattctagagcggggtaaaaaatgaggaagggaaatggaggaggaaagagaaaacaataaggtgaagatggaggagggtggaaggcaccatcgcccatcactagaagtgtcaagttgtggaggtcttggggtggagtgtgggagtttaggggcagttgcctctcctaaatctctctagagagtgacatgggagtcaagttccacaacatccgaggtgataatatcgtaaacttactattttttttaaatttgttcttacataaaattaacagataaagccttgaaagcttgacagaaattttaccctaaatgttaaatatttatgacatgagggattaccttatatagtgcgcctgcaaaaatcatgctaccaagaaaaatatctaagtttcatccttatcttcttctccaccatccttattctctccccaccactcatttccctccccatcctctctatctctctctcatttgttcatagcacaaatccaccgcaggctcagctcgtcgctgcctcagttgccggccgcggcgccgcctccgctgccggccatgatggcgccgatgcctggggatccaccgctggctcgccctgggagtgtggatcccctgcagctcgccgcctccgccaccagctgtaacggatggcaccgacgcctatggatccgccgccagctagcccgggcgcgcggatccggcctctctcagcgacggcgacttggctccttcctctcccggcgacgtgtgacgacgacggcgccgcctgtgggtagggggaggagacgcgcgacgacggtggcgccgacgcgacgacaatgacgacaacaaccgccgcgacgatggcatcaacgcgacgacgacagcgctgacgcgacgacgacaacgaaaaatgctgcgacaaggatgacgcctgtaggggcggtggcggatggaggagagccatcggtcggagggggaggcccgcggtggcgctcgtgggtggtacggcttttttttattcgctgaaatgtgtttttgatggcgggtgaatctaccgtctgcgaagatggtgatgccgcctgcaaaattcaactatttttgcaggcctttgcgtctaggcagtcctttccttcacttgtgaaaactgtttttgaccatctggtaaaatgatttttctagtagtgacagctagggaacacatgcagggcaggtcgcagagtatcaccggctggatgagcacctccgcgcgcgcgtgcagatgttgtgtaaatccaagtcgatcgcggcgcgagtgcgggggtttcatgcacttgagcacgcgcgcgcataacagaagcacccagcagccaccaccaggtcgatccatccatcccagtgctgcaccggccgctgccgtctctgcgaatggaatgtgcacacaaggccaatccactcccaacgtgtggtttttctttcgattaattaacacatcaccatgtatacacatgcaaaaagatccgtactatacgctcctactagctcttcatctctatctccaggtgaaggtatatacactgcctccttccctgaacatactctgtttttctaaccatttctcttattaaaaaaatgtaattattatttattttattttgacttgatttatcatcaaatatttttcaagcatgacttaaatatttttatatttgcaaaaaaattaaataagatgaatagtcaaatgtttgttaaaaagtcaatggcgccatatattagttcaaagagagtatatggaggagactaggagagtattgtagaaaacagattgtctctttttaaggtacaatcaatcatatatacatatatttttatttctagatatataacaaagctattgcaaaagaaaaagaatagtatgtcagaatatacaggaagcttttaagataatatatgcacctgataatagttttgggttttcatttcttaccagaaatttggtcgaatttctatgcaataatttgaatcacatgcatatagctaggtgtagaaaacatactttctgaaattgatagtgcattttccataggcagtttatcatcgtcaaaacaaaacacaccacacaacatatgccctgtattgaaatatccaagccctctattacaattatttgtatatgctatggatcttaatatcgctaatatgaataattattggcttaacccaaagtagaatttgttagatataggcaattcttggacatattaattgcattattgtggctattgcatctgtcacctgtaatattcatccaatgactagtcaaaagaccatactgatgggttgcgtgtgttgtgtaacaggttatatatgccatttgattttgttctaaagttaagattacatataagtgcacatgccaaattgttcagtgaaatgaagacatacactagctctttccatgagactaccctacagcccatgatctcgtgtcaactaaaagaaattaaagtgaaaaagcaatgttatagcacatatagccgttcttggccacattggcagagccaaacttgggcacaactcccacttctgagttaacccctatccattggcttcccatttccactaagcccttctgaccaagaccttattatctctttaataatagccatcattaacccccaatcaggtcaaagcattttcctcttagcatcatgatggtgagtcaccccaactgaaacaacccacatcgagtgcttcagtaaaataccatattaacatcacaaacaaaaaaaaaaaaaaatcaatgatgctcatattttaatcgattctcatgcgtatagtaattaatactttaaaaggacaaaacatccatgatatcggacaaaaccatttaatggcttgtgctacatatgccgcagcactgtaagttagattgactctttgtattgatcaccatgcagttgtttggtcatatttttttcatcagaacccattaatatcatgacctgagtcattatagccatagcaacaatttcacttaaaatctcatcgaagacaagaacaacgcaatgtatgcaccagttttcaatctctaagaacatctatattgaagatatggattggatgactatgttccaaacagcacctcaaaatgtatctagtgccgtgcaaccttcttttcattttttctccaaagaaaggagataactagcactaggggggttgtgcaaatccaaaaaaaaacttaggttagctagtgacatgagatcaagagaggattttggattatgcgtgggctgccccctccggggagagccacaatgatcgccgcctcacccctgtgtcgccgccttgccgctccagatggcagaggcaccaacagtcgctgccactcgccgcaatcatgcatccatcgccttttcgatcgaaaatctatctagtgggcacctaacctagctatcctctcctgctctgcttgttgagtttgtctcgtagcataatggcaggtgagcacgtctcctgcctttgaaagttcgcatgcagagattgctgcagagaggcgctatatggatgtgttcccttcaaacatctaaaaatttcgtcacataaaatatttaggcacatacatagagcattaaatatgaaaaaaaactaattgtacagtttacatgtaaattgtgagacgaatcttttgagcctaattacgccatgatttgacaatgtgatgctacagctaacatttgctaatgacggattaattaggcttaataaatttatctgcgcagtttacaggaggaatttataatttgttttgttattagtctatgtttaatacttaaaatatgtgtccgtatacataaaaaatttttggagaaggaaataaacacggcctatgctgttggatgttgcatttttctatgttgattttgcaggaactggccaatccaggccctgcatcatgggctcatcagtactcattgtgccctgcctgtcaggtacttgcaacaaacaaaaacaactatgtatcctttctcttccattttcttttctctcctaatcgatgggcaccaccaccaccatggctggcaccactgggggcactgggctatgatgccaattagcatcaagcaaccaccttctatcccaattgccaattgcatgcccaagcaatggataaatgcctgaatatatatgctcaaaaattcacaagaaagctaagcatgaagatgcatgcagatatgaatgaatgaaagttccaccagttgtagttggagttggatctcctgtggtagcacattattgtactagtatataccaggcacagtagatagtgcttccatggacgcactagtgcacgcctagaaagacaatcctcggcgtattggaaagaggaagatgcagagagggaaaaaagaaaagaaaagaaaagagaaagaattgctcgatgtcggcatgcatgcaatttggcagcaattgggaagaaggtgcagcatatatgcaagagtatgcatactttcagttttgcgcatgcacgcccggtatgatatatgcgcccggccgccacttttaacccacacattactccacaccacttcagatctctctgcatatatacatgaaggtagttgtattgtacatgcccccagtgctggccccattattttcgcagcactttgtggtgtactgaaagtctgcaactgaaatacattcttgatcttaggacattatcacttatagattatgtttgggttgagaaataggatgggtgaattgattgctcgattgtatattggttttatttggtttgtagaatggaattgagttgatccgtcaccacctcatactgtcatacatcaaagtcaatgcttaatagaaaaaaaatagaggataaaaagccatgcttaatagaaaaatttagaggtttttaactggttgaatggatagattactgtcgagggagaaccctcaataacagggagtcgtgagacccccctttcgtgagttcggccgggggcggaggctcgtccctcggaattcgtttgctcgtccctaagactcagtgagctagtacacaaacggattatacaggttcgggccgcaatagagcttaacaccctactcctgtgtttgggattatggatgaagttacaagggttccttttcttcggagagcactcttgcctcctctcttccgaagtttgggttttctctggttccacacccttgcactgtgggcagggtcctccttttatagttttaaggggataccacatgcgccgattctacctactctccaccggggaaaggggggggggggaaagaccccacttcacctttttggccttcaagacgtgccttctctcggaagctaagccataaccgatccttgagtggaacccggcgccgtcccccgcctgacacggtggtcagcccggtcattccctcataaatgatcgaagacatgcaacagcccttcctcgagcatcacccggatgtgacgggtcacacctacccccactccgccggggtcaagggtgacgtgatgatatgattaccctatccatcggatgtgacggaaacgggccggttacagaccagtcacatccgactagcaggggttagccagacgcgccgcacgtctgccctgcgagggacagttggggcgctgtgcatttacggctgttcagcctatgctcccctctgccgcgtggcggccaggcgagggcctcggggcgaaggtgcggtagggctcgagggggcgatgccataccccgagggggcgacatcgtaccccgaggccccccctgctgcttctatgatacgcgtggcgtgtgagtggggctatccggccaagccacgtggtcggaggaagagtaattctcctctacctcacatacccccgggcccatatctccgacagtagcccctggcgccgtatcaggtgttgatctcccaggattgtcctgacatggcgcctcatgactcctcaaactggggttgtgggcccggcagggaatctgaaaggatatcgtcgcgtggctaggttagcgcacttaccacggcagtaatttgaccgccttagactgcgctcatgacaaagatgcttggggcgcgataaccgggggatcactcaaaccgcgccttgattctctcgcccgctacacccgcgacggaagtggtgacagtttgtccaacttgcgcttatggccgttgcacactccacctcgagcgcgtcactgacaggcgcacaaaaggcggaggtggacgcaacgggcgacgcaatgattgggcgcgagatgcggagaggcagacgcgggcgcgaagatcgtgagggcagttatgggggcacgaaacgaggaggcgaacgcggatgaggcgaggatagaagggggcggagaaggaaactctgccttcttcctttcgccaattgctcactcatcctttcgcctctcgagccctaacactcccgcctcctcacattgtcttagacccctcatcctgtgccatctctccgccagttgctatggcccaagacgccggcgacgcagtgctcctttcctcccgcatcacggtagacaagcaccttagccttcctcgcaagattatgccggaagaggccgtcgtgcgggagggagagtcgctgccacggccgcgatatttggagcgatccgtacacctcttgtcctttgccatggtgggcttgatcccgccgttctccaaattcttccatgaagtcctggatttctacgagattcacgccttgcatctcgcgcctaatgccgtgatgacgctggccatcttcacgcatttgtacgagatgttcattggggtgcgaccgacgatgcggctgttccaagccttcttcatcccgcagctgctgcaaggcgtagtggtggggggatgctatttccagccccgaccgggcacagcgggccaatacatcgagagccacctccgcaagaaatgggaggattggaagaaggactggttctacaccgccttgccggaccatccgcgacttcgagttcccgctggccctcccgaaaggtctgccgcatggctggcaacgtcggagctaggtgaggaatatgacgcagtgtgggatcgccttaggggcctgtggagcctgggcctcacaggggcgatggtctttggcgattacttccgtcgccgcatcgcacctcttcaggaacgatcccgtggagcgtgggaatacaccggtcccaacgaccccatgcggacccatgtgggcgagcgctgggactggggcgaggaagacgcaaagagggtgattcggggggtgctgggcctggactccgccgagccaacactaatccctgacgggattcttcccctctgctgcgaccgcgaccgggagagcatcctggctgtgatgtccgccattggtgccggcaggagccggtccagccgaggcggtgccggtggcagcgccgtcagcaggggggggggcgggccagcggcctagttggcggtgactcaagggcgcccggatcgagccgcggacctggaggcgatcccgccagcgacccaaaggggaagcggaaggtggcctactcccgtccgccctctcccccgcgcgggggaggggggggcgctgagcgtgcaatagaccgttcgcgatcatgccacaagcgactagccgagcctgatgctggtcggaaaaagaagcggctctggaagatagggtagacggagccatgccggggaagcttcatcgagcccccgaagtggaccttcaaccgccctccccgtaggtacgaacgttggcgctcaccttggtgctcttgtctcttcattttcttttgctaacatgatctgggttcctttgtagtgagattccttcccagggaatcccagggtctaacccctcgcacgggcagtctgggctcggccaatctaaggccgcggggtcttcgcagcctcgcggtggggcctagaagtcacaccctgggcccgaccccgagcggccctcaggcgggacccaatctgccgtgggcgataggggtggtgacgctcctcccgagggcggccccgggaccggagcccacgtggagcgtcccctaaaatcagggggcgaaggaggacgtggcccaagcgctgaaaccaggagtggcctcgagcccgaggctgaggctgagggcggtcctgagtccgaggccgaggctgaggccgagggcggcccggaaccagaggctgaggccgaggccgaatccacccgaggccccgaagcggggggtaagaggaacagccgttcctcctggcgcttggggcaccctcggggctggtctcgcggaaggggggccgagagcagcccccggtctcgtggaggatctagcagtaccccgttgtcccgggggcggaccgcggccttttcctccccgactccggcgagcatggatccgcttctgcaggtactcgccgccgccgactccactggagaagaggatccgggacgcccgtggcatcctcgactcagctgccgcccaagagcggcgggtgtcagaggctaatgcctctctgcaggctcggacgatggcgctcgaggctgagcgcaaagccttggatgatcgtgctcgctccgcgcagtagtttgaagccacgatccgtcggcggatcgaagttctcgatcgaaatcagcgcgagcaaaatgcgcgcggtgcagaacaggcacggcgggcccaggagctggaggagcgagcacgcctgctagaccagtgggagtccaccctggccgctcacgagagaacagcgatggaggtcgaggcttcccttcgcctctgtgaagaggccgcgtccgagcgtgaccagatcacccttgccgcgaaagcttacgcagatcgccacgcggaagaactacggctgcgagaggaggcatgccgggaacgggatgccgcgcttgccgagcgtgaagctgaagtgagccgccgcgagatagcctcgcgctggctgagcgagcaactcgcgagatgcgaggaggctgttgccgggcgcgaagctcgtcatctagagagcgcccgcgccgagcgcgcggcgatagcggcaaagacctctgaactggaggcccgggagaaagacttggcagcgagcgggccgtccggtggcgcggagttggccagccaacttgccacggctcagagcaccctcgccgacttggagtgcctggcgtaggatcaggctagggagatcgcggctctccgcctcaccaacgagcttgggcccggggagctctctgacgcactcgatcggctggagcgcgcgggccgtcgagtcggcatctccgtgcgccgggacagcaaactcccgcccacatagccggcactcgcgcttcggctagacgggctggctgcaaacctggagaggttagaggaggaggtcggtgaaaccataaagacttcgtcggcctctttggcgcgggctgcagtggagctggtccttgcgagccaccaagcgcgtgaccctgacttcatgccgtggcgtgcgcttgaggattttcccccagggaccgaagcacgggcccgggagcaagtccgggaggcggccgacgctatcgtttcaagcttcgaggggtcggccccccggttcacctccggacacatttcggacgaggagagcggaagcgagaacgacgacggtggcgacgactgggacgacattgttagcggcgccagtctcgggggaccgggcactccgtgattgctcacaccttttattcctttttgctgtgtgcctataacaagcacttcttgtatttaggtcatcctgtcttgttctgcaattgaaaactctttaaaccctttcacttttttgccttttccatcgaatacctgttacatagtaaaaagaaaaagccaaggcagaaagggataattagacagtctgcgattgatatatcgtttgactccatccccccctcgggcttgttccatcaagaaggtagacccgcgttcggtccacggaacctaagtagcgataagcaagaccatcgctctgagggagtcgcccagcgggactggccggaccgaggctgcgacgaccgggggtcggggatgatcgtgtgtaggcccttccggccccgcggggttcggcacagtccggggcatggcccgcgttcgtgctccctttccggggtgtcccggtcgctttatagcacttaggttttagaacaaacgcagattaatttttgagttgggacaagccagagggaaaggggaaaaagcagtctttgcgaagaaatagaaagaaggttattgctttcaaaggaaaacatgatacatagtggcagcccccggccagttccgtacaaaccgagggattgtgcgggtgctggcctgagctccaggaaaaaaaaaatctcgatttcatggatagaagcgacggaggtgttcgatattccaggggttgggcagctctgtgccgtcctccgtggttaaccgaacgcaacctggtcggggcacgccgatcactttgtatggtccttcccacattggcgagagcttgctcagccctagacgcgactgaacacggcgtaggacgaggtcgccaacttatagtgatcgggcccggacatggcgctgatggtagcgtcgcaggctttgttggtagcgggcggcgcgcaaggccacccgccttctccgttcttcaagagaatcgagatcgtcgcggcgaaagtcatcttggttggcctcgttgtacagagcgacacgaggcgaacccagggaaagctcggagggtaggaccgcttcggcgccgtacaccaggaaaaaaggtgtttcccctgtagcacggcttggagtggtccgatttgcccacaacacggcgggcaactcctcaagccatgaatccccgtgcttcttgaggacgttgtacgtcttggtcttgagtcctttgaggattttggcgttggctcgctcgacttagccgttgctcttggggtgggcgggtgaggcaacgcacaatttgatgcccatgtcatcacagtaatcgccaaacacctcattggtgaactgggtaccgttgtctgtaatgatacggttaggcactccgaatcgagacgtgatgcccctgatgaacttaagagcagaatgcttgtcgattttgacgactgggtaggcttcgggccacttagtgatttgtcaatggcgacgtacaagtgctggtacccacctcgagccgccttgaacggtccaaggatatctagcccccagactgcgaaaggccaagataacggaatgacctgtagggcctgggccggctggtgggtctgcttggcatggaactggcatgccttgcaccgctggactcattcttggacgtcttgcaatgcggtcggccaataaaaaccttgctggaatgcttttccgaccaaagttcgtgaggccgagtgggctccgtactcaccctaatgggcgtcagctatgagctcgatgccccgctctcgaggaatgcacttcaggagtatcccgttggcggcacgccggtagagggccccctctacaaggatgtacctcttagagatacgcgcgagcttttcagcttctgcgcggtcctcgggaagagtattaccatcgagatacgcccggatgtcggtcatccacgtgacctgacgcgggtcgccagaggttgggtcgaagggcgcatcattggggtccttcaaagggctgggtcgtgctgagggctgtgcgagcctttcctcgaaagttcctggggggagtggggttcgtgccgacgcaacacgcgacaactcgttagcaactgtgttgttgcgtcggggcacgtgctggagctctactccgttgaagtggcgttccatgcgccgtacctctcgaacgtatgcttccatttgcgggtcggtgcactgatattctttggatacttgatttacgaccagctgggagtcgcctaaaaccaggagacggcggatgcccattccggccgccgccctcaatcctgcgaggagcccttcatattttgccatgttgttcgtggctcggaagtcgagacgtacgacgtatttgaggacatccccgttcggcgaggtcagcgtgactccggcacccacaccttgaaggttgagagagccgtcgaaatgcatcacccagtgcccgccacgaatgtcggcgtttggatcctcttcttctccggggaagaagagggtattagatggaatcgattcgtccaccggggtccattccgcaatgaagtcagccaggatttgactcttgatcgcatgccacggttcgaagtgcagatcgaactcagccagctcgatagcccatttcaccacccgtccagtaccctctcggttgcgcaaaatctggccaagagggtatgacgtcactacggaaacccgatgtgcttgaaagtaatgccgtagcttcctcgaggccatcaagacagcataaagcattttctgagcctgcggataccgggttttcgcatctcgtagtgcctcactgacgaagtagatgggccgctgcacctttcggtggggccggatcgtgctgtcaggggctggtgattcggggcgcacctgttcggaggtcccgaggggaccccggaccgcctcggggtcatcgagcctaaggccatctatcaaagtctgcactcctcccttgggtgcctcggggccctcccggatgcaggagagttcggttgctatttcctcgagagtcaaggggccatcgcaagtcggagggccctcctgttcgccttccctacgctcaaccactagggcggcactcaccacatggggagtcgctgccaagtagagtagcaagggttcctctagccctggggctacctagatgggaggggaagtgaggtaagccttcagctgatcgagagcttgctcagcttcctctgtccatacaaacggctcggagcgcttgaggagtttgaacaggggcagcgccctctcacccagcctcaatataaaccgactcagggcggccatgcatccagtgacgcactgcacatccctaagcttgctgggggggcgcatcctctctattgcacgtattttctcagaatttgcttctatgccttgggaagagactagaaaactgagaagtttgcccgccggcacgccgaacacacacttatcggggttcagctttacgtgcgtggacctgaggctatcaaaagtttcagccaggtcctgcagcaacgtgttctggtggcacgtctttatcactaggtcatcgacatacgcctctacattgcgccctatctgattacttaaagtaatacgagtcatgcgctgaaaagtagggcctgcattcttcaacccaaaaggcatggttgtataacaaaaagcacccacaggagtaataaaagcagttttttcctcatcttccctagccatacgaatctgatgatacccagagtatgcatctagaaaacacaaaaggtcgcaccccgcggtggagtcgactatttgatctatgcgtggcagagggaagggatctttagggcatgccttgctgaggtcggtgtagtcgatgcacatccgtagcttgccgttggccttcgggacgaccaccgggttcgccagccattccgggtggatcacctcacgaatgaagtcagcctccaagagccgcgccacttcctccctgatgaaggcctgccgctccggggcttgacaccgcaccttctgccggacaggtcgcacatccggccacacggcaaggcggtgctcgatcacctccctggggaccccgggcatatccgacggtttccatgcaaaaacgacagaatttgcccgcaggaaggagacgaacgcgccttcctatttagcgtccaaggtcccgctgatcttggcggtcttggacgggtcgtcgcgaagggggatttccttgacgggcacctcgtcagccgaggtgatgcgcttcttagaagcgtgagacgcagatgcctcaggggcctgtggtcccgtggccaccgccaggttgtccgcacgctgctctgcgtaggtgagagcaaccttgacatcaccaaaaatggtgatggggccagcgggacctggcatcttcatctggagataggcgtaatgggtggcggccatgaacttcagcaacgcaggcctacccagaaccgcgttgtagggcggattgagatctgccacattgaagtcgatccgctcggtgcggaagttggcggaatcgccaaaagttaccggaaactctacgtgaccaagcggccacgtgtgccccggagtaacgccaatgatcgggagcgacggctggagcttcatccccggggctttgagcgcgtcaaaagcagccggggagatgatgctcagactggcccagccatccaccagcacacgcttcatcttgacgttgtggatggttggggagaccaccagggccaactccccccccctgccgagcgagcaccgtgggatggtcattctggtcgaatgtgagcttcacctccgaccaacgtgccttccggaccacctcatgcgtggggacagcggccagaagctctcgcctcatggccttgaagcttcggcgagaggtgtgagggcaagctccctcgtcaagcgtggcgacgaccccttgaggtatctggaaatccagatcctcactgtctccgccatcatcggcgggggccttgttcttggcctcctcttgccgatcaccggtcgaggtcgtgggggctttgccctcccgtcgaccctgccgcttctcctcatcagcctttcagaaccgctcggccaaatttttaaccgagcggcagtcggcgagactgtggcggtcggtgttgtgcaccgagcaccacttgtccgccgaccgggcctctccggagggaacagtagggttcggcttgtcgccggcagctttccctttgcgtggggcccatgtgggcccatccgccgcaaggacatgtctcttgtcatcggaacggactgatttccttttgcctctcctatctcaccgcttagagcggggggcagactcgggggtggctgcggccgctgcaccggtgccaggagagttccaggcccacgcttcctccttcctggccaccttgtctgccagctcgaagagctcagtggtggtcttgggctccttggaggtgatcttctccaacatgcgattatgtcgcacgctgtttcggaacgcatatacaaccgcgtgggctggaatgcacggaatggtgttacggacctgacaaaagcgttgtatgtacgaacggagggattcatcatccttctgccgcacagcatgcaggtccgcctcttcccctgggcgaggatatgtgccttggaagtttgtgatgaactgctgggacaagtcctcccaggagtgaatggagtcggggggctgggtcattaaccagccacacgcctgacccttgagggccatgggaaagtaattcgccatgacccggtcgtcaccccctgcagccacgatgaccgtggtatagatctggaggaactcggagggattgatgttaccatcatacttctccgtaaggttagggcgaaacttcaggggccaccgaacattccagagactcgccacgaaggccctacaacctgtccccccaggggtgagtgtgggaggaggaccgcctcgtgaggaagaatgtggcgctccagacgaggaggcgccttcgcccatacgggcagctcggcgctcatcccggcgtcgctcgatgttgattcgagcgtcctgtgtaccgtagaggcctttgtgacgcctccggcttccagaggcccctgatgatgttgggaccatagaccgcctcgagatcgtggccgatcgatgagcccttctcctcgccgacgaggagagggtgactgaggtacgtgatgtaccggcggcagcggatcgaccacctatggccaactgccgttgagcagcagtgaccaagttggtcacatcgtccagccaacgctgaacaggagtctccagctccgggttcaccgggggatgtcgtagaagggcgcctactgcttgaagcgcgccttggggcgaatcgccgtctccataatcgagacagcggcgtaccccggcgcgtcgcggcctcactccgccttggagaggagagggtgccgaaccacccgaacgagcggcattctccctccgcgaaggttcgcggcggggaggagttggagatccatggcgacggtgacgaggacctcggctctcgccggaatcctcactccccgatggggtgggggtgaatgccaccacctcctcctccatttccaggacctcgaccatagtcggccaagtcctggaaaaacttaggacggaagaaaacaactttctcccgggacgcacaaccgccccctacctggcgctccagctgtcgagggagaaccctcaataacagggagtcgtgagacccccctttcgtgagttcggccgggggcggaggctcgtccctcagaattcgtttgctcgtccctaagactctcagtgagctagtacacaaacagattatacaggttcgggccgcaatagagcgtaacaccctactcctgtgtttgggattatggatgaagttacaagggttccttttctttggagagcactcttgcctcctctcttccgaagtttgggttttctctggttccacacccttgcactgtgggcagggtcctccttttatagttttaagggggtggcgagggcctcggggcgaaggtgcggtagggctcaagggggcgatgccataccccgagggggcgatgtgataccccgagggggtgacgtcgtaccccgagccccccccctcccgctgcttctatgatacgtgtggcgtgtgagtggggctatctggccaagccacgtggccggaggaagagtaattctcctctacctcacatacccccgggcccatatctccgacaattacagacaaagaaaacgatgaatgaattaataaatattggaattgataaatcacattcaacaaaatattaagtccaaaatcttgtaaatttctgaccttaagctttgtttcgtgattcgataatcctagctttttctcctcctccagctctagcaactaagggcggtccgacgatttacagtttagagtgctaagttgtggtgggggtgaggagagctggaatagaggggagatcgtcaggcttagagatataggtggccccatgataggtggtggacatgggcgggcggtgaggcggtggtggtgccagagctatggagatggaggaaggtggtgggcgggtgctggcaacgagggcaaagtcaaggcttgtggttaggatgtaccggtcggtggtggtagatccaatagcggggggctaccaaagacggagaagttggcgagcggggcacttgctagcaccagcttgggaaagtgaagggggaagggtgtgggggggaagggggaggaagccagcagggggctcgttggcgctgtttggccaactgttgaggccaggcaatgacgcagtggcgacgaaggaggcaaggatcaattgtgactcgcggctggtctactgggggcaccagactagggagagaggaagaatgggtttggtgttggcacgaatcttaaagctatcggccgatctaaaatttgtaagattccaaagtatttgttctgttaaatggcatatatgtagaataaatatataaagctgccgacagcttacccccccaaaaaaactaagcaatactgacataaaaagttttttgagaaagtactcctgaaaacaggccatgaataatccataccttccattagctgtttagaacgtgccatatgcagtgccaaatgctttcctagattattaagcatgttcatggtctctttgggccacatatatgagttgcaatcagagttggagacatggactgatggacatgtcacatgtacaatttgtgtgcaacgagaaggtggcgggaatcaacgcaggaaagaaaaagaatggtgcctcgcttaaaattcggtgctgaaatatgctgctgcttgactagcaataatctgtaagaaataaataaacgtgcagagctgcagatcaccaaaggcaaagcgaagctgtgcaagaactgcaaaagtgcagatcgccaaaagcgagagcgatgggttgtccagctcgaaacggaatcgcttaaaatcgaatcaagtctgctcgatcgatcggttaatttgacagtggaaactgactaaacatgccatcttacattcagcatactgaaactgaatgtctatttcagtccacggacgtgcatccatcgttcagttcttctgcaaaaagtgtaaagctattttcttgcaatgttatcagatttgttgatcaagataacgacatcgtggacaaagaacattgcgaggtactaatattcgattgaacttgcatggttttggataaaatttagctgaaaccaaatatgttcacaaacctaactcattcagtaatctgttaacctgaagatctgctcctccctgatcgaggcagtgttcttacttcctcaaacacacaatataataatacatttgaaaggagaataaaaaacatagaaataaagggaggaagaaatgttggagagtattctaaactccaagcgtacaagggaggacgcaggaagcctgacaaactccatggaagggttcatatccgagctccatcgagccccctccaagcacatgatcaaccgtgcccgagggagataagattaatcaacagcgcgctcggttttgcaacatcgcatgcatccacagcacagctgatcaggcaaccaatcaatcgagaaaacaaaacaagtaaattgagcgagcaagaagaaccagagaattcagagaagcgctggagatcaagaaccgtaagggggataaaaaagagacgctattaattccatgccaagaatatcaagatcgcgatgcatgcggcgagggttcatccgagcagcaagggaggaaggcgacccatccaagccgccgtcgccgcagccggccgccgcggatgcgatgagcaggagagaaaggggagagccctagaacagtgtcgctgcagcggcgtcctctttaaaagggaataagtttactttaggtccctctatttgtcggttagtctgattttcgtcccttgaccgcaaaaccgggtatgacccatccccaacttacgaaaacagggcaaacgaggtccctcggcagtatgtagggcggttttagccgacgtagcgcctacgtggctcctttgactaggtcttcgtcccacgtggcattaatgtggtgattacgtggcaattttatccgaaaaaataataaaaatagtgggacccatatgtcagctacacaaaaaaataattaaaaaaaggtggggcccatgtggtcccacctgtcagcctccctcctctctatccccttctctctctcccctacaagggcggtggacagagcaacaagggtggagactggagaggccggcgagccgccgctcctcttccaccctcccgttggctgccttctccgccggcgctgcgcgtgccgccgcttctctccctctcacacgttagccggcttgcgccgccgaccctctcccgccggcagccgcgcgccgccgttcctttctcgccctcccgccggccgccgatccaaacacaccgccgcttctctccctctctcccgccggccggtgcgcaccgccgctcctctcgcgtcgaaggtgcgcacagcgtccttggcgtggtcgcgtccgcccttccactctgcccgcggcctgccgccgccgccgctccgccgcgaggacgagggagagctgagaggaagaagaggaagatctgagagtggagagggagaggagaggggagccggcgagctcgagctcaccatcctacccgcccgtcctcgccgaccactacccacggacgcttgctccgcccctcttccgctgcctcgacgttgatccccctcgagttcatgtcgagaacgagggagcgaggcgggcggcgacctcggccggtgagcacgcctgccaccgctccgcctgtcaccgctccgcccatcgctcgccgccgctcccgccacccctctgctccgcccgccgtcgctccgtccaccgcccgccgcccgtcaccccctctgcgccgccgccgctcgccttcgtgtagtataagggacaaagagggggatagagaggagggaggctgacaggtaggaccacatgggccccacctttttttaattattttttagctgacatatgggtcccactatttttattattttttcggataaaattgccacgaaagtgccacgtcaatgccacgtaatcgccacgtcaatgccacgtgggacgaagacctagtcaaaggaggcacttaggcgccacgtcggccaaaagcgcccttcatactgccgagggacctcgtttgcccggttttcgtaagttgggggacgggtcatacccagttttgcggtcgagggacgaaaatcagactgaccgacaaatagagggacctaaagtgaacttattccctttaaaagggaggggcttgagtttacgggcgggatgagtttgggacgatccgtagcggagatgatgggccggtcttttcagtttgtggtccataggaggttggccagtaggcccatgagtaggcccaccaggaatgcgctgctcctcctctttgctgtgaagggctcaagctcaacttgctcaggtcaaggcctcctacaaacgtgaaaacagcgaaattcctaatcgacctatcatcgtttttatttatctaaatataaattttgagctttctaatttcttttaacattgtattacagtcaacattaaataaataaatagataagtatgtaaatttttgaccaaccaataatcatcttctaaaaaataatatttgtttctctttcagttttcatccttacatgttgcgcctaacgtagggtcactttgtgtttgcgattgtatctattacaaagcttttcagcttttcttctactggcactgttgcttttgggggcctattgaaagtgtagggaggttcttacgccatcaccctccctctatataggagcaacattttttttaccttagaagtcctatattttgcatttcggtttatttgctggttttttctttctttgtcctccggcaatggttctcttgtcatttgtgttgtgtaacagaaaatatgatttttttaatatattaacgtataattctttttttccgtgtttgcggaaaaagaatatcacatatgaattcgcaaattcaacggcacatcgcgttggaatatacgcggtggcaaggaacaaaattcgctcatgtaggccacgcacagtcacatccacatatttaatatacgaatatagctgcacctggcccccggtgaggtttcccaaaaaaaaaaagaatatagctaggacgatttaaaattggtacgtagattagttcgatatatacgcattcatttgatgcatacgtatatactggtgtatgtatataaatgccactaattgaggcaagtaaagtaatactgtatatttagtacacgtgcacgtatagctaactatccagacattaacattgttgttacgttgtggcgacatatatacggacgatactaccgatgggcgctcgatcagccgtggaaaaatcggccgctaacgtaaactattttttctcttaaattatttatccaaattatgatatgattgtattattaaattcgttgcaattaaatttttaaaacaagatcacacatgtatatattctgatgaaaaaaatttagcttattattaaattatttttaaatattatacgttgttccactaagtatatcagaattgtttcactaagtagattgaaaatgtttcaatcgtttaaatcggacactgtttcaccttatatgaaaataatgtttcagcaaatagcgaaagaatgtttcaattcactacaatattagatccatacatagtgaaacattgtgagtacactaagtgaaatatttttggtggaacaaaaaatgaaacgaattttcttaatattggaatacgtgggtgatttgttgcaaaagaatgtttcaattcactacaacattagatctatacacatagtaaaacattatgactacactaggtaaaactttttttggaaaaaaaataaaacgaatttcttaatagagggtttccagaatatataagtgatttgttgcaatggagtatgtggtggtgacaagcaggtggacatggacacgtgggaagggggggggggagcgaccgatcctggacaccgggcgccggtcgaccgatcggcagcatttccccatatataccggcaacaaactaaacggataagcttgacagatagacaagctccatctgtttttgaatgcatatacaacaattttgacttttaaacataacattaaaatattcgtacatcttctctaagatttagtgcaaatgtgcatggcatagttaaattagacttatagtaccattaataataaagcaagttacatcaaaataattaaaaaaaactttcatctgaaaaaaacaaataatatttatatatttttctttaataagataaattttaaaagttaacaatgttatactctttacatcccaaaataaatcaacttttaacaaactactataaaaaacaattttcgcagtgatgacgctctgactcgtggcccgatcttctggtgaggagaataactctcgctttgatcgagtgtgacgtttgagacgttgctactaaccagaacaagtccaggacaccgtgcaatcgctacaccacaaatgatattgtaccaaccgtgatgcgcggttgatgatccctgcaatgcaaacgagagaacactgtaagaacaagataaatgcaatataaatattgcgaataggtgatgaagcataaagtaatagttgcgattgaagtggtagatctaatcaacctggcaaatcaacacaccaactattgggggctttgaatctatagtcgtcggctaatcgagcgaggactagagacaaggtgaatggtacttagcaaaattcaattaaacaaaacccaattgttctagagggtgtatatagacatttatagaggaaaataaatctagggttaagtgttaagtcgtggaggtggagggaagacacttccgagatgggcctagtctattacaaggtccaaggcccaagttcggtttcagcaacaacactgtcttgttttgacgattcccgttgacttcaaattaatttggatatgagactagatgcgtttgaaaggtagcgagataagatttccatgaagtccaagatcacccaaatcggagttggcgtgaagacgctaggtctgcttaaagtcattgctgtctccggaggccgaactgtattccaaaacttattggactttaatatgttatagatactccattcactcgatgtattctttgacaatattttatatttcttatgcttcgttgtatgcatatacttgatggtcacatcacgtaggcaacacccatttcactatatataggcagatcaaattttcgtaccaaaaatgccgcctgcattgtcgtggacgggggatatgatggctgtcctcctgcgaaaatacatcttctcatacggctgcgaagatacatatattatcgcaggcataccccataatgctacccctgcatgatgaggtccggcttgcaaaaaccggttcatagtattaaacactagataacatgaatttgttgaatgaatgaagaacttgtgatttgttattagcaaggggtctgaacgggttgggatgggtggtggtaggatggtggcggtgtggatggggtggggtggggtgggggtgatttatttttttcgtccgccgtgaatattttcacaggagggtggatgtagcatctgcgaaaatcattttgaccgtgtatttttgcaggccttgaactatagacatagtagatggcgacctgaaaaaaaaatgttttggtcgtctgccaaaatcatttctctagaagtgactttttacatagttgtttatattaatgtgtacaaaagttacactgtaaaaaataatttttgtgaacaccctatttatatttataagtgggtcaaaagaagaccctcatgtgaaaatactgggggagtcgccggtcacggtccgtatatgaaggttgattttcacatgcgctcgctagcttatgctgcccacttattacaacatctcagatttatgtttcaaatgatccatgattaaaacatgctctacatcaatgttttagagctcaatgaaatctacaacctcttgtaattgatgaccaaacaacgagtacttaatagtgtgacggtaataatggatgcgtgtggactatgagaccgatctagagtttaaatcctccacatcatactcatgtgtattttgtggaaaaaaaatgatgtggcttgtcaattgtatctaggcggtcggtttgtccgtctaaaaaaatcaaatgtagggtatacatttgaaaataagagcaatacaggctagtactacatatacgaaggtgagaagcaagacgaactagtagtagctagctagaactagtcgacatggcatccagctggaaggagagctacctctctgcaaagcaacagacaaccatcgtcggactcggaaggtgacatgcaattaaatggccaaagcgaccgttttgcagagcggcatatgccccacccaattttatgctgatatatttgcagccggcatgcgtatgtgctagtaggaaacgaggcgatcgacgagcggcggcggctggccgatcgaccagcgaaagagcaggaaacggcacaagaaataagctcgttcgcggaaggccgtgaacgacgacaaaaccctagctagctactagtagctgagataatccattgatcgatggcaactactccctccgtcaccgtctgtcttatataattttttttatataattttttttatgattagtatttttattattgttagataataaaacataaataatactttatgcatgacttatttttttaaattttatcataacttttcaaataagacgaacggtcaaacgttagtcacggaaacccatgaattgaattttttttagacggagggtgtagctctgacgacggagagtaggacctgcatatctgtccatatactcgttctgtttgtatctgtacatgcatgacatatataatatctgcgtggggagtgattttaatcactcggggatgtctcctagagtacttttctttttctaaattcgatacaaatagtagtatgtgataaattttaaaaaaaataacaatatagagtacagtgatttctatcgatctacttaaaaatcaagttcaaatttgaccaattcagatgtgaaccgcgtgcgctactgtttatatataaatttattttttttatatctcaatatatgaattgagtttgaatctaagattttataaagttgtatagatatgttgcataagtcctatcaaaattttccagaatattttataaccgtttagatgatttttaagcaattaaacgacgaaacattgcctcgagaaatcaaaatagttccgtatgcgtctctggctgtgtcagtgtcactgatctggctggctggctagctagcttggacttggcactctgcaatgggcgccgtcgaagacgatatatgcgtatataattcagttgggggttcagttatcagtacgcctaaacgtctgaagaacgaagtgcttggtaatactccctctatcatgatagtcatattttcaaatatgaaaaatctatttttgataggtatatttcaatccaacaacctatcatattaatgactttttcagatttaatgtatgactctctattcttccacacaagattggttgtatgggcatcgagaaatataaatattaatgaatcacttgtttacgagaaataattagtagcatgtttaaattggatgatgagtggaattacttattcttggtctatgtgtcaagataaaatatgactattaaaaatagatggaggaagggagtattaattattgcacatattgcgcgagttatgcatgtgctcgtagtaggaacgattgacaatttgacatatagtttccctgctatatatgcatgcatgttttgtattaataaagcgtcaacgaccaaacacaaaatagatcaccatcagcaccagctgccccactattttccagcctgaatcacgtcagaagctaagtatttcgttggtcgatcgatcaagcccgtataactgcactccagtttaattaactaggaaggtagcccgcgcatatatgcgggaatcttatttaactgtgttagaaatatgattagggatgtttatgattactctaatgtaaacatctttattttttcaataatttgtgtgatgtttgtcgaaacaagaattcggcaatataaaggggtagcgcacgagacttaaaagtggatggatgtggagacaaggatttagacagattcaggccctctcaatgagaggtaataccctactcctgtttggggatttgaatccaccaagtgtatattgatctgtcaatctagttgtgaatcatatgccccctagagggcctcctgcctaccttatacaggatgggggcaggattacaatatggaaaccttaacaatacggtatcggtttcctaaatctactttaaaatattatcaaaccaggactttaggccgttccgtaatatacaaggaaacgtaatacccaagtcatgatccattatatatttcatagatataagttattctctataactagtcggattaccatgccgtgtgggtatggagtacccataatctccacagtagtccctgagaccttcacagtcgacaaaataatcttctctcgaactagattactccaaagccgagtgcttcaatcatcttcgcctgatcttccaactacttttaccaaatcagaagactgtggagcgctgaaaaataaagttaggtgcattgactagatgcacctaataggtgtagcccctgactatatggttagttgaacaaactaagtatatagtcaaggaataaataatccaaccaaccaagtggttttcataattgtagtcaaccaagtgacttaatattaatattgttagtgaccatatttggtaagctatgaactaggttcaacatcggaatcgaagcagatttagcaggaaatcatcttcaaagaaaacagagtgcgcatcggctacgagggaatcggctggagactgcatcgcctgatatggatcggacaaaagatagctgatgcagccgatatcacgaagatggttatataatcgtatacgggattgatcgacgtgctgtgcaaggattgccatgatagagataagctcacggataggcaattgtatctattaattagggtattttaaatagtttctttaaagatatgtttcggcaagagtctgcttaaaagacttgtttgtatcttaacgattgtacccattttagagtcgtgtccggtaaggactagtcatgtatctcgagtataaatataacccgatcctatgtaattagacacacacagttcaataacactttcggcgcatcgccaccttttctcttttcgttactttcgacgagttcttgcttcgagttgggctgcatcggtttcgatctccagtaagaggtaaaacttgttatggcgacttgtgttctcgggattagtgcttacatcttcatgacactctaatcttgtttatgtaaatcgtcaagttatcatatatgttatataatctctatcaatattgttatctaaccctgaatcggttgccatctactattagaaagtagccgatagggttagatgccaacgttgatctaggttatatagcatatccatcatctctaagaggttttcactgacttgtttagatcttttgttactctttctgcttaatgctgcatcagttacgttcgatctattaagtaatatctagaaccttaatatctaacctgttttatgattatcgatagagatagaatcggggttttagccgatcttacttgatttagttatcttgttatctttatatttacttgatatactaaatctgccctttatattaagatcttagcgcgttaaaatatattaagcttactgtttagtacattttgcttgttttaatatcttagtataaagtggtatcggagtactagccgatacatattagatctagtttcatcggctaagctatgagtatatataatctttatcttgagatacttttagatattaagtgatttatactgtctcggcatgctgtccgatctatcccaatcacatgatttaaacatgcttcaagatatagattatatattactgatatctatagccgatcggatagatttaatcttatcttgcttttattattcattgccgatcgatctcaagatgacatcggctcaaggataaacgatatgtcatactctgtttatggatttaaccctgtttatttctttctttgtttcttgttggttacaagattaaaccaactgggatgcctttgaacccaagagcaagacataggacctgcactggagttaagcagatctcccaggccagtgtgtgtttttcgcatcaacaaatatatagcatatgcgatgtgaatcccgaataacatgatccgagtgatatatcgactgctttgtaaaatatgatgcgagcaacttaaagttgtgtacatcatggaaaattcacatagcaaaacaactataaaagaagcttgtatgccgtgaataaagaaattttcaaagtattgagcatacaccatgcgtacactgctttaacaaatatgcttaagtccctaaaagacacatggtttcaccacacccagaaatatacgacatacgtggtgtaaaatccgagtaaataaactcataaagaatttaccaactgcttggaaaatgaccaaatgtataatcagcctaagccataatattggtcaataaatatgcacacttccgtggcaaaaaagcaacgatattgtatccaaccgattgctttataaatccaaacagtcccttgactatataaaaaaaattagctggacgactatataaagcttcactatttagcaccttttaaaatgcattgtaccaactcctaaaaagttaagtaacagcggtataaaaggattttaaggtattgggcacttgatcacgtgcacttttgcctaagcaaaaaatgcctaagtccctaaaagaacgtgataggccacacctgaaaatatgggctgcagacatattaggcctagacccaaatatgcccaccgatacccttgagataagacgtgtatagcacgcctattaatatgctcccgagtgacaaatctcccgggtgatgtagatcaagtacatatcatctgagtatcttctgaaccaagcagctatccctcatggagagtaccaaagtagatgtgataatcaaatcccgactagcgcaagtactcagctgatggccttcgcggggaatgatgaataatccagtctgtgagcataagaaattagctcatgaccatgaatccatgttgaatgtgttcggaattaatccaaattgaagatataatcctcgcacttgcgttgatgagcccctaagcatgtagcttatccttctgttatagtcacaattgtctattggtggtagctgacgtagtcaacatggagacgaaatgaccaacatgaagatgatatcacccatcagagccgatgaagatgtcagtggtggtaaagacaatgacaccaatcaaaggtgatgaagtcgcatagccgtggagacgaagaaaccagtcggcagcagacaagtcagccaacagtgaagacgaaggcgcccaacgacggcgacaaagttgtgcagcgatggtggcaaaataatcagtcagtgatagatgaggcgaccggtgaagaaaacgaagacgcccattagcagtaacacaataagccaatcatgaaggcgatgacaccaatcggtggcaacgaaggcaagccaacggtgaagacgtagatgctcatcaacgatgatggcaaaatccaccgatcatggagatgacaaaaacagtcggcaacggtagatgcaatagacggtaatgacaattggcagcagtagagatggccggttatgatgacgaagttgcctatcaatggaagcaaaataggctaaatcgaagaagcatgacaggatattgatgatgacgacgatgtcggtgatccagtcaatagcagagtaatagctgatgatgacgacgaggtcacctatcagcaattgcgtagtaggccaaccgtgaaggtgaaataataagtcggcaatgaaagtcggcgatgacggaagaaatcgaaggcaaagatgtagtcacccattaccaacagcggagatgtctgggccgatgaagtagagttgctggtgatgatgtcagtgataataattcatcaaattgttgagaagatatccatgctcgagtagttttcttgatgttggcatctgcataactaagattgatgcaacgcctcttgatttatgaagataatagtagaacttggtgttgaagctgttggagatgcttctcttggaggaaaatagatgttgttgttcaactcgtcaaatctgagttgattgtttgataactctaaactcccttagctcgaacttgggaagttgagaaacttgaagtagattgtggcaacgtccagaagctaaaattgtcggtaaaataattggagttgctgaagtaaaacgcctattctgaagcgtagacgaagataatgactcccgaagttgactcgttggctaattgattgattgcttcatcttgacataaaacttgtcaaattttgagccttctatttgtgtagcccccgactatttggttagttggaaaacaactgaacatagagttaagaactgtagctttttgtctagtactcatcatttgattgaagatatacgttgaggatgtctgagtagaaatattgaagattggaacaccacttgttgtagtaaaataacacggcatcatatttggtgaaacatgccgagatgtcgaggcacttgtagacgtcgtggttggtgaactagcaaggcttgcgaagtagaggcaatagagtttgccagtgccaaagataatgaagatgaagtcgctcaaccatggtgacaaagttgcatagccatgatgacgtgaacacgagtcggcggcaaccgaagcaaaccggtggcgaagacgcgtagtcgtgaagataaaaaccccagtcggcggcagcataatcagtcggtgatggaagaagcaaaatgatgatgaaaacgaagatgtccttgagtggcggcataaaaggccagcgtgaaagcgaagacaccatggacggcggtggagatgagccggcggtgatgacgatgacgcccatcgtcggtggtgtgaccaaccagccgtggaggcaaggacaccagtcggcggcgacgacgacaggccaacggcgaagacgtagaagcccatcgacgatagtgtgaccaactagccgtgtaggcaaagacacaccagtcggcggcagcggaagcaagctggcggtgaagacgatgacgcccatcgacggtggtgtgaccaaccaaccgtggaggcgaggaaacaccagtcggcggcagctgaggcaagccggtgatgaagacgtagacgctcaacaatagtggtgtgacaacttaaccgtatagctcgaggacaccagtcagcggcggacgaggcggccggtcagtgaagacgatgacgcccaacaacggcggtgtgaccacccaaccgtataggcgaggacactagtcggcggcggacgaggcggccggttggtgaagacgatgacgccgaacgacggcggtgtgaccacccaaccgtataggcgaggacatcagtcggcggtggaggcaagccgacggtgaagatgatgacgtctatcgacggtggtgtaaccaaccaaccgtggaggcgaggaaacatcagttggcgacagctgaagcagccggtcggtaaagacacagacgcccaacaacggtggtgtgacgaaccaaccgtgtaggcggagacactagtcggtggcgacagaggcaagccggcagtgaagacgtagacgcccaacaacggtggtgtgaccacccaaccgtataggcgaggacactagtcggcggcggatgaggcggccggtcggtgaagacgatgatgcccaacaaagtcggtgtgaccacccaaccgtataggcgaggacaccaatcggcgtcgacggaggcaagccgacggtgaagacgatgacgcccaacaacggtggtgtaaccaaccaaccgtataggcagaaacaccagtcggcgtcggcgatggcaggccggcggtgaagatgtagatgtccaatcaacgatggtgtgaccaaacaaccgtgtaggcggagacaccagtcggcggcgacgacggcaagccggtggtgaagacataaacgcccaacaacggtggtgtgaccatccaaccatgtaggcgaggacatcaatcggcagcggcgatggcaggccggcggtgaagacgtagacgcccaacaacggtggtgtgaccatccgaccgtataggcgaaggcaccagtcggcgacggtaaaggcaagccggtggtgatgttctgaccgatcccttcttgaagcgtaggagataagctaatagccatgaatccctattttgcatatccggatctggatcctgcataacaaacatataggatgagtagtatctgatgtaaatacagtacttgaggaaaatttaagtattttaaaatatctataaatatgtatttctcctcttgtcaattttgatttccccgagcagatgattccttacgtttaaacactctgcccgattactcattgacatgagttcgtcattaatgaaacaaagtttcacacatcagaatttactactcgggtacttttgcaattgttaagagcagaaaacaaattatcttatccctatgcttttgatttcttccgagtaatgcttagaaccttgcgttactcggtctatccaatgagcccccgggttctaggaatcggcccaaaggcaactatccatcaacaaactaaacataaagcataggaagatagaactctataacttgataggcactttatttttactcggattattcacaagcaatcaagataaatattgtgaaaattattgaaaaaatatgatataacatctatagcccccgactcactactcaatagagaaccaattgatgtagtgaggcagaggaaaagaaaaatatcatataaaaatgatgacttagctttttggtattccccttggtgacgacagagatggctgatgtgggaaaaaggtcgtccatcaatagcgactaaaacaccagccatggaggcagctgaggcgactggcgatgaagatgaggacgcccatcaacggtggtgtgaccaatcggcggtgtgaccagctaaccgtataggcaaaagcaccagtcagcggcggcgaaagcaggccggcggtgaagacgtagatgcccatcaacggcagtgtgaccaaccaactgtgtaggcagagacaccagtcaatggcggtgaaggcaagccggtggtgaagacgtagatgcccatcgacggcggtgtgaccaaccaaccttgtaggcgaggacaccagtcggcggcggcgaaggcagaccgacggtgaagacgtagacacccatcgacggtgatgtgaccaaccaaccgtataggcacaaacactagtcggcggcggcgaaggcgtacaaccgtggtggcgaaaaccacccgtaggcgatgacaaaggcagccgttggtgaagaagaaggtgtatatgtgtcatcagcggagtatggcatgcttgattgaatcagagacgatatctcccgatgatctcagccaatatgttatatatcctgatgtatgttgtgtggattccataaaaaaggttgctgtgtgcatgtatctgtctaggtaggtagatcacgcacgtgcatgtatagcatggacagaagtggctttgatcgatgccattaaggggtgaaaacggtacagaatatttccggattccgggcaggttttcgaaaacggaatcggtcggttggaatttttttggaatttttcggaaacggaaacgaatacggaaatattttctcggaaacggaatcgaaaatgataagagcagtttccgacggaactcggaatcggtcgaaaactttccgaaaactctctcggaatttccgaagttacaaagtccataatacctcccgcttgcccagcccaacccactacagctaaccctaccctagttgaggagagtgagaggtagggatggcaatttcccccgcggggccaggtcccctgcggggacccacccctacgggggcgggggcggggccgattttcgacccgcgggtgcgtcggggacggggccccgcatttgggcggggaggggatgggggactgatttcacccgcgggtgacccgcggggccccggggagtacatatagacctcaaaatatagatcaaagaaagcccaaaaagcccagcccactaaaaaaatccttaaccctagcagcactgcagcacagcagcagtgcagcacatccctcagtctctctcctccccacatccattcccctcccctcccgtcatccactcatcccgtgcggctgtggcgtgagccgcgtgacctaggcggcggcgcgcgctcgtgggcggctcgccggctcgcctctggatctcgccctctcggcgtcgccggcgcctgccagccgccaggccaccatctcctctcccctcctctccagtctcccctccggcgtccggcggctcgagctcgtcctctccctccggagtcagcggcggcggcacacggggcggcgccacggcgggccggcggcggcgcacaggcgcggcggggaggcgacaccggcagcaagggcgcggccggcggcgcacagggcggcggcggcggcgcacagggcgcggccggcggcgaggttgcagcacatcacaaagagtgagaggtattgctccatctccaatactccaaatgtgccttgtgatttgtgaatgaaattatgaaacagaagattgtgatctatttcagtgtatatttcagtgtatatttggtagatttggtagtacatagcacatagcagcagattgtgatctattattgaattatgttatttgtggacagaatgtcgaaccctgctgccaccgttgagtcacaagttgcattgacaccatcttccacttccactcccactccaaccaatgctccaagcgtcgaaataaatgattcacaaggtacagaagtagaacatgataataagagactgaaatctgcagcatggcaagattttgttaagaagaaaataaatggtgcgtggaaagctgaatgcaaatggtgtcacaacaagcttggagctaaaagtagaaatgggactaaacatttgttagaccatattaaaacttgcaagtctaggcatgctagaaaaggtctaacacaatccaatttgaagatgggaatagatgcagaagggagggttaccgtagggaaatatgtctttgatcaagaggttgttaggaaagaacttgcactgatgatatgcctccatgagtatccactttctattgtagaccatgttggttttcgtaggttttgtggtgcattgcaacctttgttcaaggttatgaccagaaacacaattaggaaggatattattgacttgtttggggttaacaagatttctatcagtaattattttcacaagcttcagagccgtgtggccagtactactgatttatggacaacaactcatcaaaagaaaggatacatggcaatcaccgctcacttcatcgatgatgaatggaaattgaagagttttcttttgaggtatattgaatatgtgctgcacattatgctatatcatgcttcttacatttgtttaactctatactaatgttctcttgtggtgttttatgttttgtaggtttatttatgtaccagcacctcataccgctgatcttataagtgaaattatttatgaggttcttgctgattggaacttggagagtaggctgtctactatcacacttgacaactgcagcaccaatgacaagttaatggagaacctattggggacaatgctagataagttgcctgctgatactcttatgttaaatggttcattgctgcatatgcgttgttgtgcacatattttgaatttgattgtgaaagatggaatgactatcctagataaaatcattgagaaggttcgtgagagtgtttcattttggacagcaacaccaaagagacatgagaaatttgaaaaacaggcccaacaaataaatgttaagtatgagaaagtaattgcccttgattgcaaaactagatggaattctacttatctcatgcttagcactgcagttttgtatcaagatgtctttacaaaacttggaactcgtgaaaaaatgtatactccttattgtccatcaaatgatgattggaagtttgctagggagctttgtgatagattgaagattttttatgatgcaacagaggctttttctggtagtaagtattgtactgcaaatcttttctttcctaaggcttgtggtatttatttggctatgagaaaatggtcaactagtgctgatccaaacattataacaatgactaaattgatgtcagccaaatatgagaagtattggaaggatgtgcatggtattttggctattgctagtgttttggatcctagatataaacttcatatgttgaacgctatgtttatacaaatctatggagaagaggtggcactaagaaaagttaatgctgtgaaagaagacttgtataagttagtgctacaataccaaaatcatgttgaggagggtgttggaacttcagatggagttaatgcttcttcaagtgttgcccctccagggggatttgatttggtggatgatatatttgatcagtatatgtctggacaaactgttgcctcttcctcacagattcgcactgagttagatttgtatttggaagagaaaccgttgcctaggacacaagattttgatattatcaattggtggaagtttgggggcattaggtacccaactttgagacagattgcccgggacattttggcaatccctattacaacagtagcatttgaatcagcatttagtactggtgggagggtgataactccaaatcgtaatcagcttaaacctgatcttgtggaggcacttatgtgtgtgcaagcatggggtcgtgctgatatgttaggtaatttcatttttgcttttgtatcgttcaagtttaatttgtcctttcatgtttcttccatttcatctaattgcaaatcacattatatgttgatagctgaaattgctaacaagaccaatgcattgaacacggtacttgacgatgaatcagaatcggtatgtcctacactcccactttattgtttttattactataacatacaatgcttagttgcttcctctaattttgatttcaggaagcatctactgtcactgaagcttgaggtggagatttcataagtgaaggatgggctagaaagcctgcaattgcaaactatctacctatatattttattatgttggcaatgtaatagtatattaagacttctatatttctgtgagactgaatttgcttgctgagttgctgtgtgtgatgtgttgaacaattcaacggttgaactttgaaggcttgattcgcttgaaccgttgaactcatgtgtgttagtgtgtaactgtgtgaaatgatggatatcatcaatgtgttcttgctgaatttttatgatgaaattgaagtattcatgctatttttgatggtgtgttaattatgtacaatatttctttttgatgaaatgatgattgtgttgtattttttgagctgattggatggagatgctacccaatgcggggccccggtcgggttgcggggccccgcaggggtcgggggcgggggatgttttcaacccgcatcactggtcggggccgggggcggggggtgaagtcgggggtcggggtcgggggcgttccagcccaacccggccccgtcccgccccgttgccatccctagtgagaggtagagactagggatctggcactgcagtcccccaacgccgccgctgtctcgtgcgaccgccgtcccgcgccgtcctacccccgccgccgtctcgcgccaccgccgtcccgcgccgtcctaccccgccgtcgccctacgccgccgctgtcttgcgccaccgccgtcccgcgctgtcctctccccgccgtcgctcgccatccctgcccccggcgttttgcccctctctgtggttcgccgccgccgtccccgccgcctctcaccgtccacgccgtcgacgccgatgcccactagcgactcttcctcacctccaccaacgctgacgactcctcgccgccccgccgcccgggcatcatcccccagcctcgccgccgcccccctctctgccttgtcgggaagcacaggagaagaaagaagcagagaaagaaaagagacagggagagagagaaaagagatgaggaagaaagagagaaagaaaagaaaagaagataaaaataaaaagagagtgggacccactcctttccctcagcccttgactcagctttgaccggcttacagtggggcccattaaagtatttcatttggtataattgtattttatgattaattattgactgttgagacttgagaatttgacttgataaaagtttgaagctcagtttgaggggtttttgtattccgataaatttttgttaccgtatccgcgccggttcgttttcgcttcattttcggtttcgataatattcgtttccgttttcgtttccggggtttccgtttccgattccgactctgaaaataatatgaaaacgaaaacgataaaggttgtttccgtccgttttcgtaccgttttcacccctaatgccattaggtgatgcatgtgaattaaatcctggttgcttggtgatgagttcttgacgtgtatgcatgcatatacatgcacgagccatatacttatacgggagggtgcaggacttccttgtgcgataattgctccaatcagttgctcggagtccacgtcgattccgattcaaacaattgaatcttgccaaaaaaatttgatgtcgacgagaaagacgccgatgcctcaaagctctgcatgcatgttttctgccgatgcttgatctgttgcttgacagctttgcatgcatgtttcgtcgcgtcgggacattactgcatatatgttaatataacaacccagattggttcttgatctgacgccttgaggataatgatagcgaattgcgatcttatgtggcagcagcgtctgggctcgtgaaatcaaaaaacttgccgggatgaaggtgatgctggcgacggccatagtcgattggatctgaaactcaccatggtcgagtgtttgttttccttcttagttagattaaatctctcccgactggtttgaatccgagtcagagaggcgagagcttgttaaagttgtcggcggcgaggaagtgaaaactcccgaagcgaaaaagaagccggcgactcatgaagttgattccatcacactcgtcgataggaaattcggtgcacccctaccttgcgccaactgtcgaaacaagaattcggcaagttgattccatcatgaagttgattatttattttttcaataatttgtgtgatgtttctctgattgctagtaaccatcgcctgcgtataaattctaaactaaaattacttaaaaccgtgcagttttggttttataagaaaatatatatatgcaactatatatcatttgtacataatgtgtttcttttttttaatatttagcatatcttatttttgcactttctaaactctgagtaacaaattttcttttgtataatatatatgtctttatgaattttacgatatgataattgaagatatttttctattaaaattatggttaatacgactacatctaattaaatgagctgaatatgttgaaatattgatttaattgtaagtatatagtattgcagtatgaaactatggtttagcggtaaatgtcttcttaatcagaaaatatattagaaaatgagacttttattgctctcaagttgtagtttagggttgtatacttcgaactgaaattatgttagattttgtttctatcataatgccaaaaaattcaaattttctattatattatatttaaaattttagttatttttattttatcagtactccaaaaatatttgaacatttctatttagaatggatttcaaattaatatatttgaacattgctatttgagcattccatcaagcaccccttaaatgctttgatctctgcaatttgaaatggaaatataagtgggttaaggccatacaacttagcatgggataaagacaacccttaaatgttttcaatatattgtgtatgacaaatagatcctagacgcggtacacattatgacatgaaaaaatgatataattaaaagatttttctctaatctattagtgacatcagatatcatatatatatatatatataatttagatgttatgatcatcttaggaatgtttatttatctctaaaaagatcatttattcataaaagtgcaactaagatcaagtataagtaaatagcccctatatgcatgttaagagaaattaactacttccactgttgaggaaaaatatatcaatatttacaacaccaaattatttttattgaattcaaaattgaatatttttataatatgtttgttttgtgttgaaaatgttactatgttttttttataaactaattcaagtaatttgacattgacaaaatttaagaattacttgtaatttaaaacagaaggagttggaagaaggtcattagatgtctaggagttggaagaaggtcattagatgtctagcatggtataaataatgggttgaccgtttattaaaaacataaggtgagatattttaatttttaatcagaaattttagtattttattttatttattggaggcttaaaggtggatagatgtggtccacaatgtaagtcaatacgcatattaaattattgatttaattgaaaattacaatagtttagaaatatcataaattgaatatacgatttaaaattttatgagtattttaaagtctaatttatgttgttaagagcttgcttgaggagaaagagaagaaaaacacatgacagaggggaaagctggctagacttgttaggcggagtctatttgtgggattttttttttctcgtaaagataattttggatttagttactatggagataaaaggaacagagaaggaatggtaggaagagaggaacgataggcatgggagggagggagggagttttgggattttcttttaaagatatatctaaccatataagaaattggatcgttgatgtaagtggaaaccgatggttagatgttttattttcatttatcacacttatagattattttaatttattagagtgttacgtggcgatcaacttagaagtgtttatgggtgtaccattaggcctagagatttgcagttagaatggctgcacgatctaatttttagataacaaaatatgagcaatatggattttgaattctatatttaattataaataacacaacaattgacaacacctgagaataaaattgaacttgagagtcatgatcatttagatgtccgaattattttgtaatatattgagtgttaatgataaaataggataagttagcaaaaataggagaagatgggagattcagagtgtggaagggatacttactgcgttttttttacctcatgtatgtaagatgttggtggtagggataccagatttattttctttgagatagagatctattggttaaaattaacgaatccaccatttgacaatgtgattatagggtgtcacgggataatataggagcgtttgtaggaggccatatgacggctcgagagtgtttataggaagtttaattggctttcagtatataagtctattaaactttctacatgtcaccacattaaaagaaatattaaaaattatgagaaaaaggaaaaatatctagctgttgattttcacttaaatctgtaatatgtgattttatatatctattaacacttcctcctaaactcccctacgtgtacgtacgatgtgcgtagtagtactgtttgtttgcagaaggtgtaaagaaaaagtactgtttgccaaaaaaaaggcgaaaaaaaataatactaacgtagtaacgtatgtacaccgcagaaaaaaaaagaacgtatgtatcctgcccgatcctgaccctgttatggtgttctcctcctattttttctctgtatattagttagagaaaatacagcaatttttttttaaaaaaagtgaggataccagatttattttttagatggagatctaatagttaaaattaacggtccaccgatttaaaggaaaaccgacggtgagattatagaatgacatatggtgacctagaagcgtttgtagaaggtcacatggcggcttgagagcgtttataagaaaatgagtgttgcattacgcatgcagtagttctgaatccaatttctgtctacaccagtgggtaaatcaagagatctctgaagatctttcagcgatgtgaactttgtttcattcagttccttctccacgatggacagagatgtaggatcgaatcacaagaactaagctaaccagagaggggtgaatggttggtatgcccaaaaaccaaaacttttagcggaaataaaagttaccctcaaattcgacggatcgcggtctgaccgaagttgtccttccggtctgaccgcacatgtgccgtcggtctgaccggtgtagatcaaacggtccgaccgccctgagatcgcctgtagctccctgtcgcagtcgccggtctgactgccttacaccccccggtctgaccgccggtgtgttgccggttagaccgccgaaacccggtcaaacacaaatcgaagaactcttgaatcagcatatagaagatgaagtagaataccaaattccaaactcaagtatatgattcaaatacctcatttttcgcttgaccacttaacgatgtgaagcacaaggagaagcttgaaagcgcgcacacaaacacatagcaaattgtatgtctggcctagaagcagttagatacaacaaagatccaatcatacttctatactccttttgatcaacagcttcaccatcttcatcaggatccaacacagctatagaaccaattggtgttgaaattggcttgcaattctccatcttgaaccgtctcggaagatctttcgtatacttcgtttgatgcacaaatgtaccttgaggtgtttgcttaattttcaatcccaaaaagtacgataactcacccatcatgctcatctcaaattccatgcgcatagtctcagcaaactctacaaccaaagcgtgagttgaacaaccaaagatgatatcatccacataaatctgaacgaacagttgattatcaccaagcttaagaacaaaaagcgttttgtcaacctttcccattgtaaaacctttcgcaagcaaaaagtttttaagcctatcatactatgctctaggtgcttgtttcaaaccttacaaagctttagacaatttaaaaacatggttggaaaaatcaggattttcaaaacccggtggttgtttgacataaacttcctcatgtataaaaccatttaggaaagcacttttcacatccatttgatacaatttaaaaccttttgaagcagcaaaagccaacaaaagtctaattgcctcaattctagcaacaggagcaaaagtttcatcaaaatctaaaccctctacctaggtaaaaccttgagcaacaagtctagcattatttctcacaatcaaaccatcctcattttgtttatttttgaaaacccacttggttccaataatattatgtccagaaggtggttcaactaaagcccaaacattatttctctcaaaattttcaagttcttcatgcatggcattaatgcatgattcatcagttaatgcatgtgacatatctttgggttcaaaagtagcaacaaatgcagaatttgcacaaacatcatgagtcgttacgttagacctagtagtccgctcacctagattaccaatgatttgttctggcggatgtcgtcgttgtatatgcaaaggagcagtgacttctgaagttgattcacgttctgttgaagttgaagtctctggaggaccatctcgatcagcatcaatagtacccgaacccgacgaacctagccgatctgaccgcacctcctgtgtcggtctgaccggaggtatgccggcggtctgaccggcttggtgcccggtctgaccagccgagccgacctcgtcgtcgctctcatcttcaaaaatatgaccatcctccccctgaacctatgacaatgtacctgcaatatcgggtctagtacctagactagcctcatcaaaagaaacttcgcaagtctcaacaattttgttagtctctaaaacaagtacacgatagccacgagagtgtgcggggtaaccaagaaacattccatcagtagaacgtgcctcaaacttgtccaaatttccagatttcaagacaaagcatttgcaaccaaaaacacgcaaatgtgaaactttgggttgatgtccaaatcgaagttcataagaagtttttccaagttttgatctcaagaaaacccgatttgaaatatagcatgcggtgttaatcgcctcagcccaaaattttctaggagtgtgatactcatccaacatcgttctagccatctcaaccaaaacacgattctttctttcaacaacaccgttttgttgtggaacacgaggagaagaaaattcatgatcaggacctctttcattgcaaaactgttcaaataaagcatttttaaattcaccaccattatcacttcgaattcctttcaaagaaccaagaaattcaagatctaatcgaagaaacaaaccacgaaagtgttgaaacgcctcatccttagttgccataaagaaaacccaagaatatctagaaaaatcgtcaacaataaccaacacataccactttccttcaactgattgcactctagctggatcaacagtgtccatgtgtaatagctgtcccggtgcatcagtcatcacagaaacaataggagcatgtgaagaagcaaccatcttagcatgacaacacggtgtacaaatcaaatcaagatctttcttaagtttaggcaaaccacttaacctcgtgagatgatcaaaaccaacatgtacaagtctacgatgccaaaacatcgcatctttactaaacttagcaaccaaacatgttatcacaagtgaaacaggattttcaaaattagctttaaacactcttccatagcgagaaatattcaacacagaatcaccacgagaatcaaaaactttacttccagatttcataaagtgaacctcaaaatcttcatcaataatttctgaaactgaaagcaaattatactttaagtcctcaaccaaagctacattcttcaattcaaatttctcatttaccttaaccaaacctgtagcgagaatggcactagtagaagcatcaccaaagataatcgattcagtcttggatgcctgtttgagagaggagaaccaatttttatcaccggtcatgtgctgcgaacaaccggaatccacgatccacacgttctccttcctcgccaccaaagcctacacacaagaagaagttgaagccttagtactagggttagatgataataaaaatttaggaatccagtactgagacacacgactagtatgatgtctagtatgatgagcataaggattaaaacctaaatcacgattatgtgtgctaaccttagattgatctagaatcatgttgaggttctttttaccatcaaaaaatctttgcaaataatttttcaaataaaaaacatctttttccaaattagcacaattttcacaatctatcataacacctttgtttttgcgacatttggggcaagaaagtacttcattggttttcacaacatattccatgtactcaacacgacctaaagcatcttttagtttcatcttattcaaaacacatgttgagcaatccaaaacatcatgtggttgttttaactttttagcacaaatcatgttaaacatcaaactagcatgaaaagcaatttgatatttttgcaacaactttttagttaaaaacaactcatccaaagtgcgtgtgtgcaaggcaaaactacaagcaacagaagatttatttttcaaatcatgtgcaacattgacatctctaatttttgaaatctcattcatcaaaacctcacaatttttgcaatcttcatcattgggaataagagattttaatctagcaatttcagaattaagagattcaatcatgaactcctatttcctacacatctactcacacttcttattttttgcacttaaaataagaatagctttctcaaaagcacttacctcattgtcttcaaattctgcatccgattcaccacgcgccatgaagcaaacaccggagatgttctttccctcatttttcatctccactctcaccatctacatcgcttagtggctcaaacgcagcgtagacttgatcaaatgcctttttgagagtctccctgattttcttccctcctttaaatgtactcttcagcttgttgtcattggtcttctcatcacccttatcgtccctcctatttctcccaagtttaggacaatgcgaacgaaagtgatccgtagcaccacattcaaagcaacgatttggtccacctcttttcctgtacctaacattagtcacggctcgagaaagtctgttagttaacaaaaccaagtcctcctcctcgaattgttcgagttgatcatcggacatggcattaaacaaagcaaatacggaagactttgatgaacaagaattaacatccaaagaagttgaggaagaaaccaaagcactcgacttagaatcaactttacgtgcaagaatattcatctcatgtgttttcagttttgtgtaaagcgaatccaaagtcaaagtagacatgtcaacagactcctgaatagatgtaactttcatttcccaaatagacatatcaagaccattcaaaaagtgacgagaaatctcagattgtgtgtaattaacatcataagaagaatcaatagatctaagatcactcaaaattttgttaaacctagaaagatagtcatccaaagcttctccaggtttcatctcaaatttaatgtactcattttttaatagatctcgacgaagttctttaatgttattagttccttgatgaaaattacttaaagcaaatccaaatctcatgggcagtatgaagatgagaaacacgatcataatccgaacgagacatcccactcaaaagaatattgcgagctttgcaattttgttaaaattcagtttttaaagcagcagaattaatttgttcaggaatcacataaggatgagaaacttttctccaaatatcataatcctcagccataatataggattgcatcctactacaccaatgagaaaaatccgttccatcgaaaacatgaggcttagttgaaaacctaacagccatggcaaaaaaactctagatcggttaaaattcaaagaagaaaacaaggctctgataccacttgtaggatcgaatcacaagaactaagccaaccagagggggtgaatggttggtatgcccaaaaaccaaaacttttagcggaaataaaagttaccctcaaattcgacggatcgcggtctaaccaaagttgtcctgccggtctgaccgcacctgtgccgtcggtctgaccggtgtagatcaaatggtccgaccgccctgagatcgcctgcagctccctgtcgcagtcaccggtcttaccgccttgcgcccgccggtctgaccgccgcaatgccgccggtctgaccgctggtgtgtcgccggttagaccgccgaaacccggtgaaacacaaatcgaagaactcttaaagtggatgacgactttattgattctctctgtgtttacaaagtgcaccaacaacactcgttacaaaatttcgaggaaactcgaaaccctaactcaactatcaactcaattgctctcaaaaacgataccgggaagcctcacgctccccctctatttatacccgaggtaggcagcctaaagccacgaaccaaactcatactagaagtcttaatccacataggaaaccctctagtgcaagaaacaaacattatataaccactcataccaaatttggactccttccaaattcgactccgcatcccatacgcacacaatacctctatcgtatgccatatggaaccttcaccttccacgtgcattgaactctagccttagtatcccgcatgatctctgaccaccctggacgtcgtcttatccccaagccgactcccggtccatcaccgcaaatactcacccggcattaattcacctacacatggaacaaacaaagaaaccatattccgagaccaagctatccccaacttgactcattgttagcaaacaacagtattacatacgcatagtatccatctagaagtcataaacatgaaacaatcacgaatatccaaataaacaacccaaaatcgaaaccgacacagcgtcggccggtcaaaccgcgggctgcaccggtctgaccgcgcaatacacaccggtctgaccggcagcacctgcccagtctgaccggacccaatccagcagtacctgtagatcacctgttaaaatccaatcatctccaaaaccacttcgcaaataatttccaaatatcaaaaccaataatcttcaatgccaattgttcatcacaaaataataatcaaaaacacctttgattttacaagagactttgcactagcagagtttctgctagacagaaaaccgaagcccctcttcacaacattatcagttaaagcttcatgacataaaagggcttcaactttttctaataaatccaatagcatggatatattattgatactatcaactgaaaagcacttcctaggaaggtgaatcaacaaattcattatgcatttctttaaagctgtggctgtcatatcaaattgcttctttagaaagtccagaaagcacataggttcacttgttccatcatcctcaagaagcatatcatactgagaaccacaatcttcaaaaaaggatatcatggaagctattttgtatctccagccagtcaatgatgaaaagcactcagcaagttcatcggcacgacaatctaagaaaacatcttgaagctcctcagtgatgtccatattatacttgtttccaaataataagacatctccaagagaaaatggtaggcagttttcagtgacattctttctaaaatccctaaaaatatgaaggaatcgggtacaaacaccaacaatggcaacatttgtgggtgcacatgtaagagtcgtgcatttcaaacatctggatttttcacattttggttcttttgaaaaacttattttgcaaatagacccttggaaaaacttatcccagaaatgatcctttttggggtgccaggttggctggcgccgtcgtccaacgggacggcgctagcctctctggccacatcctcctgccaccgtggcatacgcgaaccgacgtggctggaggagggcgccaacatggctggcgccgccacagggaggagggcgctagcatggctggcgccccccccacccctcgcatccgttcctgttaatctatatggagctgcaacttttttattttgttttattttttcggatgttttttcacacttaggatcacaatacaaccaaccacttagcctactttacaccttcaccaaaattagaccataactcctttagtaaaaccctttgatcagcatgttaaacataatgcactctaccactatatgaaattacttaatctaattcaaaatataatctcatgaaatgttgatagccataagttaaacagtacatagagatgttcaacttttttatttttattttatttttttgatatttttttcacagttaggagaacacacgaaccaaacatagaaaaaataaactcaaacagacaaaatatgtgacttgtagaattttctaaagctttaccaaaacggacaaaatatgtcattaactaaaataggcgtaactttctcatacggactcagaatcaggaaaataatatatccacggacatctacagaaaaagttacatccgattcttattggctttgccgggttcgacgatattaaaacctccaaattctgcttgcaagattgtgtttttgaggagagaagtttttcggtagacatttggaaaattccacatgctacatatttcgtccgtttgagtttatttttttatggttggttcttgtgagttcctaagtatgaaaaaaatatcaaaaaaataaataaaaataaaaaatgtggacatctctctcctctacactagagaggagagagaggagaggagagaaaaaattctacaggtcacatattttgtctatttgagttcattttttctatgattggttcttgtctgttcctaagcgtgaaaaaaatataaaaaaataactattgtcttgtccatgacctcatcgagcgaccaggagggggaatttaactatttgccattattgcgtttggcaattatccaaatacccctcttgcatttgcactgaattttttgcccttcttaagaggtggcttcttaagaggccggccttcttcctcgctgccgcactttgcgcggcctgccgcccgggtggtcgccatcaccggtgttagcctgggcgaagtcaaagaagggcggatcaaggacccggagtcaaaaagccggcgagatcaccaccggctccgcgttgatccaccaccaccggcctcgcgttgatccaccaccaccggcctccaatcgcccaagacaccaccaccaccacactcgccacctccacgcgacctcgttccgtgtaacaccctgaaaattcctgataataaaaatcactaaaattttgaactttttaaaacttttgcatcatgctggttgttatgattcctattgcttgccaaaccataaatgatcaccaagaaagtaaagaaaagaactacatttaagcaatagatataatttacgagaatatatttaatcctacaaataattatgcacaagatattaaaatcaaataaaagaaaagttattattaacctattttatcaaatattaaaatatttgaataatgtaggtgggtgccataatatgagtacacatgaaatgatgattattcaaataaactgagctctctgtatatataatagaattatgggagtatttaattcgatatgtagatctatattacaccaagttcctaattgcatttagggattgaaatttaatatattaaacccctccatataaactaacatataaataaattgaactaatgtgctattgtgttaataacggtctcattagaaaattatagaatctttaataaaccttaaatattggataatattaaattttgggcaaattcacatttgaacacttaatacggtcacccaaatgcttaggagtaaatacaaatttaatttgcaacttttctcaatttataaatcaaccaaaaccctaaaagaagaaaaataggaaaactttgaaaaatatataataataataagaatatgttcaatattaaatttgaatataaatttcgatggaataacttaaacttggtgtattttacgttgtgacaaaattagtggcaatagtatatttttcctaattgcaaaataccttctaaaaacaaaaatggtcggcaagcactgttcattagcccccctaggtgttcgatttggttcctagccatcctagccctcttcctccgcactaccgccgccgcgtcatgtcgcgtcgccgtcgccgcgccgtctccaacccgccgcgtactgtcgccgtcgccgtcggctgcgccgcgccgagccccatgcgccgtcgcgtcgtcatcaccgttgtccgcgctgccgcatgttgccgtcgcccgtcgcgtcgccctcgagcccccgcccccacaccaagtcgtgcgcgtcgcgtcgccgtcgcccgtcgtgtcgctctcgagccccgcacgccatcatgtcgccctcgagccccacgtgccatcatgtcgtcctcgagccccgcgcgccatcatgtcacccttgagccccgcgcgccatcatatcgtcctcgagccccgtgcgccatctgtcgcgtcgaccattaagccaccctttccacaccctataaataccccctcccatctcccttcttccccacaccctcttggctgccatcacaaggccccaagagcccccgagctcgtcctcccctctcagccactcctcctcccttctacacatttcatcgaacatcttgtgggcgtgctgcatcttcttctctactccacggccgcgacatcgaacttcgtcgttcgtccacccctcggtaagtcctcgctcctctagcctcacctagttctgtagaaactagagccccctttaatttcgccaattagcaaccgaagccgtgccggttcggccgccgttccaccgccggcgagctcgccgtggacaagccatcttggagctcctcctctccatctaactagcaaaatggaatccccatacgccgtagatgctcaagccctcaccaatttggtcggaaaccctccccatcgccctagcacctagccacccgtgcccagccatggcggccatgctgtgccactcgcccccgcgccgtcctgcgccgtggcagccggcgggagatcgccggagccttgccgcacccttccctggccgccgtcgggtcgccctcggccggccttgccgtgcgcgtcgtgtttcccctgctgctcccgctcggtcgggaggaagaaggagacggaggaaggagaagaccagccgagccactgacaggccgcgccctctccttgcttttccctaagaaaattaattcggtagaaaaagaaaaggaattctgggtcccacctgttggtcactagggttatggattagattacggattaaaaaaaatcatttatgaacagtagccttttacaatttttcggatttattccaatttgaatctttaaactagcataacttattcgttttaactccgattcgagtgaaacttgaacctaaattcatctaaattcataagctttccaatggtatacaattaactatttaataaaatatatttataattataaattaattaatatcaaatgattagataatagttaacctaaatagtgtgccaataaataaaaatggatattgtacagtagaataattatctttaatatgttttgtcactgtagcaaccacataaattaattataatcaatgtttgaaattaatggatatataggaaaatattagtgccatttattaatctatgtccaaatataattaaaacccatgacttattagttatttaaatagagttagccttataattattaggtaagtaaaatatagatacacatagatcggtcctaagcttgtttatggcaaataataacagagctagtgtgattaaatcacctatatgaaattaatcaacgacatatcccatataatagcatatagtaggagaggtgagcaacccttagttaaccaagcagtaaatagaaactattcaaataaatgattccatatattaagatattgtgcacatatattgtacatcccattatagatatatggtatcgtattaatttgcttgttgcatatattaatttagagggagtatatgacaaacatgaatattagataaatactagttatacatcttgtcctcgtataattacagatcaactgtaaatttagattattcattgtaaaattatgtgatgggataatctgtaaccataatatgattaacctaaacaattctaacatacaaagcatgggtaattgttaaccttttataatttattttgacaagtgaaatatgtacataattaaaataaagcctccattaataaaataataatacaaatgattcacagtaattatttgaccgatccaaaatccatccggcaacagaacctctaatgtataaccgttctatttagatagatgcatgtgtaaccataatccttccttagccattagctagactgaaccaccatgacaacagaaagactaagaaaccttagctcttagcttgattagagtccattagcaagcgcgaataatatgagcaacctttggttcgacctcagcaaatatattttgtttgtgcatatttgattgttgcttgaatattggtttttctcgcgtattatagactttgtgtatcggttagtcgtgaggcaacgtctgcaacttccaggaggtgaaggttgatcaagattatatcgagaatagggattatcctgagcaggcaagtcatcaccattccttgaacatgttgatcccaattgcgaaattgttttgtttacaaataaaattgcatgtaatgatgaacatcctacttgtgattatgccatgccttgattattgtttacccttaaaatccttgtaaccatgattatttatgagtccctagtcaattatgacaattgcttagaaatgccattctagaatcatgcatactcatatttatcaaatgctatatgcttgggcaattacctttgggaatgtaattgagatgcggcatgtggagacatgagcgccacattgccatgatgttgatgacatgatttgtgaaaggagaaataaaattaaacaattgttttcgactggggcggacggaggatttgggtggtatctgggaaaggctagtaccgtccccggtcaattaaggaccgagccatgaagttaagcatgaaacgacccccgtacaaccgtacttctcgaatgggtatagacctagcggattagatagccgagcgaaggcagtatccctgcatagatggttcacccctgagtgaggcaggtgcgctacgatgggacagccgttgaggtagggccgagaggcgtgccctacatcggtgtcgccattggtaggactgccatgagtgtgtgagagagagaacttaacttgaaccataatttaatatgtgtgagacttctctttcccgggagcgccagaactcctcacactgctagaaacatggacgcctagagtgcatgaggatttaagttcatggagcgggtactgccaatgcgaggttatcgaaaagctttaccgtgacgcgtctcatgtgttgggacgaggctcatgtgttgggcagtcgcggagcgcgggtaaagtgtacatccactgcagtgtgagtaaaccaaatctattcgaatagacgtgctcgcggttattgagcaccgggacatgtattacacttggctagactctaaattcttaacctgtgtgggatgggatattgcatgatgatttttatgttgatggagccacttcctgagaggagggaaggtggacgtcctcagaaaaccatgacgactcaatggcgggaagctatccttgggatcacaatggatggtggacagaaccgtcgttgtttaatgtgaacactggtattaaaacttgatcagtctatgctaggtctcatgcttgtgaaaagatttgcaaaagcttgctttacgtaaaagaacctggagcccttccttgaaataccctctatcatatgcattgttgttgtggtggcttgctgagtacggttggtactcacccttgctatttatatatcttttaggagagtgttgaagagaagtccttgtcgatacgcttgcgtatccaacaagatgatcggagtgcggtcttgttctaggtctcattccccagtcgactgcctgtggcatgttaaccgggcccttatattattttgtcttccgctgttgttctctgatagttgttggcctacttggccctaacgtaagtatttaactcttttagcctgaattcattcatgatatgttgtgatccaactatgtatgtgtgtaccaactactgatccactgattggtacggataaacacagaagatttccgatttccaaaatcgggggtctacattccgcccctcactggcgcccgatagccatcgtcgtcgttttccccaaatcgggccgccgtcgtccgccattgctgccgtcgctgaacctcgtcaccgcccccaataaagcccccttctcccctctcttcccttccactttgcgtgctgcacccggctaccgctagaatggtcatcatcggcgaccaaacgaccacgcccaccgccgccaggaaacctcgccgtgcaccgccgtcgtccatcaccttctatccctcactcgcaagtcgcaccgcaccacaacaacacaagaaaagggaggcgaacgatggagggagatattgcggcggcgtcgggggtggacgcggcggcgttcggcggcatcaggagtggatacggtgtcgctcagcagcggccggcaacggggacggcataaggggaaggcagaggtggcggcgcggaggaggcgctgaagagagacagggagagggtgcaggcggttgcgcctgccgacgcaccgatggcgatggtgcgcgtgaggaagaaggcctgcgaagggagatgaagtggaaggagactgactagtgggtcccacatcgtttttcgctcaatgttgccatgttggcttgccacgtgggtaaaagtggcaaatagttaagaagccacctcttaagaagggaaaaaaattaagtgcaaattcaagaggggtatttggataattgccaaacgtaatagtggcaaatagttaaattccccgaccaggagagcacgatgtcgcccaaatccctgtccccaatgtcgccgccacggcaggggcctttctctctcatcgaccaaactgggtggtggagaggctagtagcagatggtggagaggctagtagcagaaagccacaaccagcattcgcgaggaagagtgaggaggagtcgccggagtcgcggtcacgtggagtctaatggtggtcgcatcgctgctcgcggagaaaccggagtgatcagtgagaagaggaggaggagaggggtttaatggcggaggaggagtctctttagagcaagtttaatagtatagcatactactagctctaaatcatctatagccaatgtagggtgtgttcagtttatgccaaaattggaagtttggttaaaattggaatgatgtgacggaaaagttggaagtttgtgtgtgtaggaaagttttgatgtgatggaaaagttggaagtttgaagaaaaagtttagaactaaactcggccgtaatagccaattcatacaatagttgcttactatactattaatatctggtcccacctgtcatacacccattacgtcttggagtccgtactgcagcccgctgctcttcttttttttttcctttatctctttaaaatatctttatctcttagcttttgtgagaaggaaaaaaaaagaaccgagagtcggcggttcatccactgcggttcgtgcctttttggatcatcggggactggaccctttgtatggggaaggcaaagaggccgtcgcggtggtgtgtgagtgtgtgaccgtgtcgagtgtattggccgcgttgaaatgattttactactgccagtttttttttccaaaaaggaatccacacaaggcatgtcagcaaaaaaaaaatgatttcactatgttgcaaatgttcactcatttacatctagaactacaataaaaataaatatataatactagctaaaattctagacacatatatatccagattcgtagttagtattgagtttttttttaagacgaggcgtaaactagagtctatattaacatcatgtctaaattttaaaaactgctactatttatataaaatatcgattttgttataacattagttgaacatttcgctaaacaacattagttgaacatttcactaaactacaaccgtagaaaataattttatcaataaactacaacattaacaaattatgtacgcatgacaggcggctgcgttagataggatgggttgggaacccatccccttcccacggaaaatggagtagtccattagcacatgattaattaagtattaactattttttaaaaaaaatagattaatttgatttttttaactaacttttttatagaaactttttgtaaaaaacacaccgtttagcagtttgaaaagcgtgcgcgtggaaaacgagggagaggttgggaaccttgaggttcgaacgcagccgttgcaaatgcaaatcttacttacatgataatagtttcatcaaaataatagttttgagaaaataatcatgtttacaatttactccgacatctataatgaaaaaaaaaagaggttggtgatctataataataggattataggtagaatgtttgtcttgtctcttaccccctccatcccataaaaactaaccagtatcaaatatgacacaactatgaatctgaagatatatatgttcagatttatagtactaatatgtgtcatatcatatcctagattcgtttttacgagacgagggaagtactactatgcaaaatgtactgttagcggaaggaagaaaggctcgacccaattatagtttcgtctcttatgacacttccatatctacagtactctcgccgtaccataatataagagatttaaggtgtatatgacatatcctagtacaatgaatctggacaggctgatccacccaaaatcctttatattatgcaagggagggagtacatgccatatatatatatatatatatatatatatatatatatatatatatatatatatatatatatatatatatatacacacacacacgcgcgccaccgtttgatactccatctttagttttactcttatctttggagagggggagtgtcaacgagtcaagcaactgtgacaggtcacgcttgctcttgtcggttgaggtatggatggtaatcgaagccacaggaacaaattaaacgaaagataattatggataaaacttttactgtattattcatggtctagaaaccaagatgaaaactggactacaatgaaaaaaaaagatccaaaatcagtttcaaaatattaaatttttctatggctaataagcaggtgcggagctagaatagaattgagacgggtgtcacttacttaatttactctactttagattgagtttaagctaatatgggtgcctaaatttgtattgaaaggtacacacatggtaaaaataggtgatgtataactctaaaaaaattttcttaaccaggttcgtaggcacccctaatatattttacctccgcccctgctaataagccaataaatagacgacaagaggattatacgggtttcctatcagcggtggcatagagcatagtttaacgtattgcgaaattctagttcaataacctttgaattactactactagtagagcaaggattcgagtaggcttgagtttttgaaatgaaaaaggaaaggaaaaaaaaacaacgccgtaacatcactcggtgcctacaccttccagagtaaaagctcgcaccaaccgctgttctcctggaaataacaactcctggcacgccgatgccccccacgcttcccgacgacaacaattcggtgaaagtagtagctgtacaagtgacgagtacagctgacgcctctcgtagcactactagcagtctagcatgtaggaagacagaggtaggaagacggtgaatgcgaaagagatggcaaagcagaacaagagcacgagaccctaccacaatcaaaagcccaagcgtttcgcctttcggccttatggacagtgagaacgtcggactgtacgaaaagcccacaccgatccgtgtcagctctccctggtccggacggctttccttccctgtcacctccatcttccacgcacaaaggcacctcgcgtgttaagagttcgattccgtctcccataaggcctgttttctcaaaaacttttcccgaaaacatcacataaatacatatatggagcattaaatatagataaaaagaaaaaataattgcacagtttgcatgtaaatcatgggacgaatcttttgagcctaattagaccatgattagctataaatgctacaataacctacttgtgctaatgacggattaattaggctcaaaagattcgtctcgcgatttccagacgagttatgaaattagttttttcattcgtgtccaaaaataccttccgatatccgatcgaacatccgatatgacacctaaaatttttcatttcaccaaataaacaggcccaagcaaaagatacgagatattttgatttttcctgtagaaagtactgtatctgtactggattatgtgagtcgtagccagatagattccgagttctgacgacggtacaatgtaggagtagagcactatagagccgcatggcaaaatagtaatttatcactcacaacggtatagaaccagagtcctgcagtaaaaccgaaacttcaatgcatgtctccatcatacatgggtttgcctcgtatccacagggtacaaggatgaaacagggttacgggaatttttttgggttttagatttttttttaatatttatagaaataatctatcggccaaaaaaaattacaaaaatagaccctgccgcccacctctggagcggcaagctgacgtggcaaacgggggaggaacgggcggtgacggagggagggttttttgcaggaaaacccttgccgccctctggtggggcggcaagggggcattcgggccccttgccactctctggccgggcgacaggcctcgctgcctataaaaggcctgccgcccagcccccagctctcattcctccctcctcaattccagtgaaaaaaaaagaagagaggggaggagaagagaagaaggggcgaagccctgccggattcagacgccgatttcaggtaatattcatagatcctatatgtgactattgagttaaatagtgtgtattttttaaaaatttgtttgaataaatgcattatatttttagggttttagttgtactaatctagaagtacgtattgtagatatcggtaactacgtagatctgctagtttggaatcaatacattaccgttgcattggcttacacaagaagatatattacgttgtagatgtttattgcatgaaagagtaatatgatctagttattccgttgacagatatgtcgaacaaacaaatatttcaagtttaccatggaccaggaaacgtccgttacgggccaactggggtagatctgtcagattttattgtatcagaaaggggaattgatagaccggctgagaggagtgtaccttctataaaaggatggttaatgaggggcttgagagttgatccacagacaagtgacataacaatcaatgttatagtaagtcgggcaactgaaggtttttattgggaactaatgccagttcaaaactctcgagtgtggagatggtatttggaaaatgcattgcaacgcgggtggcctctagctttggttccgtttgttcacccgaaggatccaggtgtgcagatgaacatggatgatggcgagggaccaagtgctgaagtaaatgagacttatgtggaggaggtcaacgcacgagaggacgggggcgtagtagctccagtgggcattcaaccaggtggagtggccgacgagggggagactgttggtgccattgtggatgaaatggagagggaggattctgacaacgagcgtgtagaggaaggtgattcgtcagatgatgagacggatattaatccagcagaatgggctagcgaggatttttctgggctgattgtctctgaagaggatagtgtgagatgggagtacaaagaaaatgaggttattcagggagcaatttatactagagcaaaagatatgaaggaggcggtaaaacattttgcagtgtcacttcatagagaattttgggttgccaagtcgaaccggtcgcaatatgaagttcggtgtgttaagaaaaaagatggttgtccctggagagtgcacgcgtataaggggaaatggaaggattattggacagtatcagtcgttaccaagcatacatgttttctacctggtgttcagaaataccacatgaacattacatgtgcatttgttgcatttgagatgtatgcgcatgtcatcgataatctcacatatgaaccaaggtcaataatccgacacatcgaagagacatacaagtatactattagctatgccaaggcctggagggccaaacagaaaataatagagatgagatttggaacttacgaagcctcgtatgacaatttgccacgcctgcttggtgttatcgaggaaagaaaccctgggagctcttacgaagtgaagaaattcccctcaattgaacatcctggcaagagtgtgctgcaaagggcgttcttagctctacatgcatgcaagatggcattcgtgaactgtcgtcctgttctctgcattgatgggacattcttgacaggaaagtatcggggccagatactaacagcaataggggtagatgggaacaatcaggtattgcccttggcatttgcttttgttgagagtgagaataccgacagctagtactggttcctgaaattggttaaaacaaaagttgttggtatgaggccaaatgtgtgcctgatacatgataggcacgctggcattctgcgagcgatagaagagttgcagtttgggagtatggaacgaggataccccggtgtttgggaagatgtacagagtaggtggtgcatgcgtcatatgggagctaatttcttcaagcaattcaagaacaaggagctcatgaacatgttcaagaggctgtgcaatcagaaccaggagaaaaaattcaatgagctttggaagagattagatgagttgacagccaaatgcagtgatcagcgtgcagcggctccatcgaccgccgttgctgaccctcctcaagctcttggacctctcccaacggatagtccaacattggctagaagaactggattggagattcggaaattttctcagtggattctgcatgaaccaaaagagaaatgggccaaggcgtatgacacaggtggtgctagatatggaataatgacaacaaatttggcagaagtttacaactgggtgatgcgcggtgtccgtggactgccactagttggcatagtggagttcattttacatgggacatgcaggtattttagggatcggttccaggcagttcttccctctatgccgaacaacagcattttgtttggaactttcatgcagaacaagccagaggagttgcgtaaaaaggccatgaaacatcaagctctagtgcaaggtacccaacagcacaggtttgagatactatgtcaagataaggcaggcaagggtatctaccgcaagagagtgaagcaggagtgtgttctcaaagccgacggcacatgtcattgctcttgttcaaagccgaagctgctccacaggccatgcacccatgtcattgctgccgcagcagagtgtggcataccagatgcagtatatgtgtcacagtacttcagtaagcaagcaatatatcatacatggagcggcgagatttatgggttcggcatagctggggagttcacagagactaacgatgaagtactcaatattcctgacccatcgaagctccgaggcaaggctggaaggaggaggactcgtcgcatccgcaacgatatggacgagtcggaggctggcagggtgaagcgttgcagcaaatgcgatgaacatgggcacacctacaagcattgtcctaaagacaaggagaaatcaagtgcggcgatgaacatgggttagtagtcagctggcgacttttgttgaggactggttgctcgcaaccgaggaggtcgtggaccacgagggagaaccacacactgaggaggcgtaccaggcctacctatgctggtaccagccacgcacctgtactagggtcaccttcgctcccttggagcagcagccccacgttgcgagcactagagacctctacgccaggcaccgcgaccaggacttcgctcgtgctgtgagtaccctgcatcgcaccattcctttatgttttcatgtctttctcttcgtcaaattttacgaatatttacgaacaaattaaccatgcaggtcgacgacatcaaccgggtcgtcgttgacggttcaacgacgatccaatgtttaggcgtggggattccggtacccgtagaggagcacctgacgacgtacacgcggatggtggagtcgatgcgctcgattctccgagtgctcacctgtcgtgcagacgacgttgctcgggcagacgcagctgtacagcggccacccgtaccgactggtccctgtccagctgcgcacgttcctaggccgactccccctctgcacggaggtaagtatttttattactatttctgtacatgcctcgcacatataagtgagccgtttcacttgccgattgcttcagggtttcgtgcaccgttcagtaccccgccttcctcggctaggccttctgttgtgccccccacaggtacttaaaaaaacaacattacttcgacaatcaatttacatgcattttatgtcttagcttataagggtcccgttgtcgatgtgtaggtttcgcccagttcgctatgacgcaggccgcccacttctcgcaggctgcagggtcagcgtctcaggcagctgcgtcgacctcgcactcagcgcagttctggcagtacaccgggacttcgtcacaggcagccggcacgtcgaatcagggtccaccactggaccatgctaggacctcgtcggaccgcttgctgccttccaccttgctcttcgacatcactgactttgacttcgcttcaggctcgacagaggacgtcatcagcccctcacagctgggaggcgcaccgccggtgcagacgcaggaccaggcgcaggccactcctccgcgggacactcgtgctactcgtgctgtgccaccggatcgtttcacctactcctaggaccacgtgcgagcacaggcccggaggaccaagcgtggtcgcggcgcggggcagggccagtagagcagtcttctctttgtttatttgcttcactttccagtactgtatgcttgtgtaatgactacgttgttgttatatgtgcacaatacctttcggcgcatgcacgatacctttcggcgcatgcacgactactttctgccgcaccgatgcagccttctttattcgcgtgcgatacgagtatttgcccgccatttggcgcatacgaccaatgtaacttttggcgccgatcaggcatgtaactttcggcgccaatcaagcgtacccaccataccccaccacgttcacatgtcaggggtatcactcgattttttgcgcctatataagtcgccttaacgagtgaggcctcacaatctttcagaactcagtcacattcagtactctcttccccacttgcttcattacaaatccgactggctttcgtcaatggctagacgtcggggtgttgaggatccgaactggcgtagcaatccttgtgtatacctactaccaccttggtgctagcgtcctctctgcctatgcggtgatcgatgccaactaatggcttcgaggaatcctgatattcgaggaaggcgcttttttaggtgccctaactattttattatctgcatatgcttattcattccgtatgggcaatcgctttattcttcgtaacactactctattcggctctattcggcagacccgcactacggcttgcgcatacatcgagtgggtcaatacagaaaatctcgttctcgacctaaccacttgtttacaagaaggtcgctggtatttcgcatccgaaagtactgagcaatacttacagagaaaagcggcaaaaagcggcttatgaacgacaatgtcgtgaacaacagagcgactggcgggtgctaactacggcactccctccatgggaagcccatccaagatgcaggtgtggtgatcgttgtcaggttcttcgttccataaatcctacaacattgggtcgaaggttctttgtttgtccaaatattcttgacgacgatttcataataagaatattttgattacatgaatccttattttctcacaatatttactaactttgcttgctttacatctattttttcctcccaggaaccactaaggagatgtcaatacagagaatggatagacaccagaagggttctaactccacctagccgtgttgtgcagcttgaactaccagagcaatacagggttactaaagcgcggtttgagagaggagagggatcctcacgtaggggttagctattatcggacaactaggcatattgaaatttctactgtcatgcttccttgtcccattactacatcgtcgctgtgttcaactattgcactacctccctcctagttcgaatctaatatcatctatgtaaccgcaatgcaaatagttatatcatgttcaaattgtactactatttcttcatgttacataattctccttgtttaagtcaatataatgtttctacgacccagtctgcgataggcctatataaattatccgagtactaatacgtcgaataaggtacaaaataatacctcacttaacatatgaaattgcgcaacaaccaacttcaatacatttttataacaatattaacaagttttaccaataaatacttttttatttattattaacataacatagaaaaatcttttggccgtacttttttcatctgggtcccttgccgccctagcagtaagggacccagatgtaaaaagtacggccgcaagctctttatgggcggccaaaattgcaattagccccttgctgccctctgtatgggcggcaagggcctaatcgcaatttttgccgacggcggcagatggcgcggtcgacccaccgtctgccacgtcagcttgccacccaccattagggcggcaggggctatttctgcaatttttttggtcgatagattatttctgtaaatattaaaaaaaaatctaaaaacgaaaaaaaattccagcctgaaagctaccagatccatccaacgaagagctactgcaagtttgtactgtagcaaaatgaaaccgagctggatgtcaagctcaaacttcttgtgacatcagctttcgaaattcacacgtactagcaggcaggtgaagttagcagagcacatgcagtgtcacaaaaaaacgtttcgtgcttcggtaacgatctcaatcgcgtaaaatagtagacccattaagtttcttcactaatcaacaatgcgaaggtcattggttttcctcttgcattgaaaatggtactccctccgtcccacaatataaggagaattttgagtttttgcttacaacgtttgactactcatcttattcaattttttttttgcaaatataaaaatgaaaagttgtgcttaaagtactgtggataataaagtaagtcacaaataaaataaataataattctaaaattttttgaataagacgagtggtcaaacgttgtaaacaaaaactcaaaatcctttatattatgggacggagggagtagtgggtcatatgtgtctactctgtggcaataaggaaaggaagtcccctgaaagaaaaaaggcatttgaatcagtttcacaacagtaggtaggcatttcaatcagtttcccaataacagtagttaaaccaaaatttacagaggaaccgtctccacaggttaagttcacacggcacttaccagccacctctcctagaaaaataatcacaatccagagacaccgcaagagctagtgcaacagccctttcaggtaaagtcaactggcgaacaacatgcagttcatcgatctgtgaccatcatttgtgacatggatctcgatcaggtaaatagcagttaagtaggcaagctgtgtgtggactgtgaagtactaaaatgagaacagcacttacatctgaagcgagaccaaatttacggtttagtcctgcatcaccaaatcgaattgcatactggccagcatctgtgaagagctgcagtgaaccaaagatacattcagtccttttttttttggaataatgatacattcagtccttaaaagctcagtcccattatttatgcaggctagaagtagcagtgcaacaaatgaaaaaaatgcactttgaaaagatgtggggtgtggcatctgccatcagctgcatcaaactgcacaaatatgtggagtcaccataaagcaaattcaaattactgcacaatgagtctgtcctgtataattgacgagttctgtaaaaaaacactttaagcaatgtaaaaaagcaacaccgtcatataaatttggaagggcagctcttactatcaatctgtaaataatgaatctatatgtatctagtttttcttgtcagataagcatggaatgcccaccgacataaaagaaaatgcatattatttgacaattctctactagaaaagacatttacctcaaaaccgattcccctccaattacgatcaatctgggctagtacattgtcatcctcatctgtgagagtaaaggtccagttccaaaatccaggattctcgaccacagcaaattgcctattcctaaagaacccaaaaggtggcagatcaagtgtcaggcagtaaagcaatactaaaaggtacacaaagaattgagtaatttgagtctagtcgaagagacaaggaaatgcagagatcagaagaccaaattaccctaagtacaggtcataaattctacgccagagatgccaacgtctgtggactacacctacctcctaaccaaattgaaaccgttaaacaatgtcagtacattcctgcacatttatctgggggcaaaattcccatctaaataaatttgcacaagcaagtaaagaagttttgcataccttgccattcacttctgcataaatggaactgttgataagccaaaatggccgtcgaacctgaaataaatggtgtaagaacatatttacaaaggagtgcagtaatagctttattataaaatagtaccgtaaagatctcattgcccatagcatcagtaatttctgcaacaaatggccttcttgagcgaaatagctgaaacattagcaaaatgtttcttgtacatcaaagatatggaatgggtaaataaacacaagacctttttgcacgacagttatacaaacttgatacatatttactccctccgtcccataaaaaaccaacatagtactggatgtgacacatcctagtactatgaatctggacgtacctctgtccagattcgttgtactagagtcacatccagtcctagattcatttttttcgggacagagggagtactttttatcatcacaatgaaaagttatacaacaacaaggccagatcaaataaacaagacgaacatgtacaatagagaacacttccttttaaactactgctatcaacagctagctcaggttctctaatgatctaacctttatgctatacctcaaatctaccagatcgataaacaaattatacataaagcattctacataaaacaaattatacataaagtagttgatatttctctgaaagaagatgtaaagtatgtttccattaagttgaaacagaacaaaagcacagatataacccatccctcagtatcccagtaaccacttaacatggtaacatattgatatgttagatgattaaaaatgggagggaaaatattttttgacaaaaattcaaacacccacaagttacagccttgcataacctgcattcccttccatatctctagtttctgagtctctacagctagatactacaactccattgtgaaattttatataacactacattctacacatcgaaattctacataacattgcatgagtcccaccacattctacacataatgaaattttacataccacatcacagccaccctaattgaaagtttgtagcatcgatcattacaagaaaaaggtggcaagagactccttgcccagcaaagagagcaaccaaaaaatcattcaacacaaaagaaaaggagtcgttaccggtgctatagctaaaagaagggttatctgtctaacccactaaaaaccaacagctgttctttaacactaggaagagaaatgcataactcgataggacatgatgcatgatatatgagaccatgataatgttttatacagaaataaaataaagtcgatgctgactaagcacactagtacaaatatcacatagcataatagttaatttgagaagttcaacatattatgaatttatgacactggtttaatatttagaacacgaaatcatatatgttcgaacttaagtactgctacgcagagaatttaaagaatcaaaatcctgtctctattccactaagttactttgaagtcaaaaaacaacaccatgaaacatggactactacagtattaacttttttttttcgccaggaagtattaacttatttaggataaattaatcacaagccatacctgcctaaatatgacattgcttttctctcgaatgaaaccaacaggctggaaatttgacgaaaaatacaagtcaataatgaagccaagacaataaaataatacaacaatagagtaatacagcaatggaaccaatgacaatctgagtacacatactgattgaggaaagagcggatccattatgatatatctactctcctgcagtatgagtaataacagtaagtgataacaggttgaaagtctgaaacaatcaaaggacataattcaataactgggagaaaatatcaatgtcccaaataaatgtgcatatattcaggaagcacagaatgaattgtgtaactttgttgctggtaaaatgaattatgtcacttttttcagttttttagccgagaaacgaagcacttattcaagtatgtgctatcctccttgaatcacatgaaaattgcctgttgttttatacagtaacaaaaacaaaatagcaaggacaattgaacacagttactatttcatttccaaacacagcaagagaagcatcctagagtcgcaacttcagtacacgtaaatgagtaaatgactcacagatacattacctgctcaaaagccaacatgatatttgcccattctatgtccctagcgatcaggaggttggcccttgagaggagaggcttcagtttggcctgcgaacccacaggaaagtactctcagttaatcaagtaactctagataatgattacacataatttcaacatgacgaaacagctcatgtaggataaacattgaccattaaatctaactgtaaagaggtaaataaataaatatagacaattaactgattggttaatatccttccatcccacctgcccacaaaagtgtccatcttgttcattcaaaaaattggtttccatcttcatcctatatcctatacccttcaaacctatccagctattctgcaatacaaatttaccagcaattccaaaattggggtatagtaattcatcattcactctttcaatctgacatgtcatagttgcaaaacgtatatggattcaacgatagcatcaacaatcagactatgttgaatgacagtgcaaaataacagtggaacagactataaacagaaataaatcccgcttgcctctattggcgtgaggtcccgatcgtcgtgttggaagctcctcgacggcgccatggcgaaatcgccgaacgaatccgcaccgccgccgtcgctggtcgcgaccgcgcgccgcccccaccgcctcgcaacatccctttgcttcctcaactcctcggttcacagcttctgtagccactcccgaggcaccaccgtaccatcgccgcccccgcagccgctcgcgaacccattggatcccccgacatggctgccagtggtcctcgctgtggccctcccagccgccgcggcgtgggagagcagccggagcagccacctcatcggagcgaactgcagaggcgggggaggttaagaggtgttaggattctataagagaaggtttcatcgccgcccccgcggccgctcgcgaacccattggatcccccgacatggctgccggtggtcctcgctgtggccctcccacccgccgcggcgtgggagagcagccggagcagccacctcatcggagcgaactgcagaggcgggggaggttaagaggtgttaggattctataagagaaggtttcggtgtggtcgcggaaatggggtttccacgctccacgacgttaacgatggaggttaagaggtgttaggattctataagagaaggtttcggtgtggtcgcggaaatggggtttccacgctccatgacgttaaggatgggcttttgccgcaggtacggcttccggaggattaaagtgggctcatttccgactaggctatgttgggccaactgggccgtgggccaactaccgtcttaatgttttttttccatttttcaaaatgggcctttacgaaatgtgtcatacacgtccaaagaaaatagagaattgcacctatacatatcattggagcataacaaaagtagagtcttttcatacactagcgaaatgcccgtgcattgcaacggatgaaaacaattttaataattaatctatcatacggtaaatcatccgttttactcattgatatttaataaaaataacgtgaaaatatttagaaatacatcaatatcattgtttattaataatattttttcctttaataattttaacttgcattttattatgttatcacttaaatataaatttatatttttctttaattttatatatgaatcgtacttaaactttataaaaatattatattcacattgtttctaacattctattgttattagattgtacttggcatatatcattttgttttttttattctaaactatagttaatttgaatttattaattacctaatttaaatatctatattattagtctaaattatttttaatattaaaaattataaaatattatagatatatcacaatgttttagagacgggaagacaaagtaaattcgatggtttcaatttataacttgataaagaaagaatgctaaattagattcatgccaagtggcacaatatgtcttataaaatttataacctaataaagaaaaaaaatgttaaattagattaatgccaagtgttacagtatgtcttttagaaaattttgtggaatgaaaactccttataagaatataccttaataaaaagatattttgtgtgctatgagtagtttgtggtatagattcttcttaagaaatttatgtgagtttggatgagtacaaattatgagcttacattttccgttctaatgcaactattctaacattttccgttctaatgcaactattctaagagtgtttggatgagattcagtaacaaagttacatcggctaaaaacaaaaatcaaaattaacaagttgaaagtaggtggaactgggcagaggcagatctaaccctgtttcggttgaacccccaaactttttcgagggataacgcagaatagctgatgaggtgtgggtagggagggatgctcaccggcgagcgacgatgcggtggaagcaggaggacgccgggcgccacctctcctcgcaggatggggatcggcgcaagcggcaggcgaggagacgaaactcgaggccgaggccggatgggatggattaggatgctcaccggtgagcgaatgcggcgggagcaggagaacgccagcgccacctctgctagcaggatgccagcggcagggcaggcgaggagacgcgagtcgagggcggcgggcgaggagacgggacggataggggaggcggaggtcgtgcagcgctctgctgccgtatactcatatgcacaggcccatgaggctggaatgttttcatctcccaaaaaagttcatctaaggtcccttatcttgtcgttgagttttaaacggtacttaaccctctaatattgtaaaaccggatcacttttgatcataaggtagtattgctttctggttttgttgacacggtagtattgctttctggttggttttgttgacgtgcggttgagtcccacgtagaccccacaagtcaatcgacaacttctttcacctcactcccctctactcccatctcaacccaaacctccagggcatccaccaatgggtggggagaatggtgtcggtcggcggagaaaagctcaaggcggaggccgccggctgacgtggctcccaacggccgggagcgctcacatcatggacttgcgtgcgcggggagtgcggcgcgggtcccaactacaactgcaatgtcgtcttcacctgttcttgcaaggtgctaggtctaagtaatttttttataagggcgcttatcactacaaaaaatagtttttagtatctttccatatgggcagcgcaaaccgcatgtgaaaacagggtttttgcgtgtgggcacatatggtagctattttttaagaaaatgaactattacatatgcaacaggtgaatcagtgaaacaaaaataattaatagctaaaactggttgagtgaaaaaaataatatgaaatgaaggaagtaaagtatattctatgaactgttggtgctcacaagatttctatacactagggatgaaaacggagcggatacggacggataatgctcataccatattcgttttcatatttttttaccggatacgaaaacgaatacggatagctcgaatacggaaacaaatacatattatctcgaatacgaataagtatcgaatatgatcggacacgaatacggaaacaaatttttctcggaacacgaaaaccaactcaacttctaatagaaacaaatattaacatatataattagctcattttatataaaatgaggtataatttataaatattttttaaaatttaaataatattaatagtatggactagtgttaagagataaactactattaaaatctataaaggtatattgaaggttatagagttagaaagaaatgtggtatgtctcatgtgtcctgcggatatccaaatagcactgttcaccggatatccgaattattatccgtatccgacggaaaccctggtaccatattcgtattcgtatccgggagaaaatatccatattcgtatccgtatccgaactatccgagaattatccgatccgaaaggtatccgtatccatttttgtccggagcggacggaaactatccgctctgttttcatccctactatacactggaagacaaattcgtgagacccactagtaaaaagtctctctctgtcagctcgaaagacaactgactgccatgggtctcatttatgtgataggggagacacaggtcactgcttgaggccacaggcagcggggcgtgatgttgtcgtgctcggattggaaactgaatttttgtaagtgattggttctgtttgacgtgggcggaagagtcgaacacttgcggaggatatggaaacggaccaaaaattgtgtgagacacgcttttctatgacatatgacaaaaacactattaatgttttaagtagataatgatatataactatataagtcgtattttgcaatgaaatttggtaggatcgatatataaatacattataacctatctctcagtattttcatattttttttaccgccgtatacatatatttcaagatttaaatatcgtggttttacattacaaacaatagtcatgaaaattttaaaaatattttatgagctttgataatggtgttatgtttggcactacaaaataactcgtataaaaagaaacaaagaagataaatgctcgagcaaaccaattttagtagttcaaggggtacaatgaggcaaaagataggttagtgggttaagggtgttcttttaactccatcttcctaacttatactcacttgtttccgatctgctaaacagtgtattttatgtaaaaaaaatataaagaaaagttgctttaaaaaatcatattaatttgtttttatgctttttaaactaatatttaattaatcatgtactaatgcgtgctctgttttactacaggctaaataggaggggttcctagcccctctttccgaactcagcccatatgaaccaatgaaatattctggagaattaaaatagattttctttcaaaccaatataataatatgcttgtgctaacgctacaatgatattatattttgacaatcaggcatacagatacagattcacgccaaggatacaggaaaataaacatccaacctgcatattcattattctgaagcacaaccaaaagctaccaatgcagctgaaaatgaagttttacatcatcccttccttcccaacattctcaagtttagttaaaactctttaaattatgttcgtaaaactccagatattcaggaagtttagaggaagaatgccaaccgctatttctctcgagagcatcctttactcattttttcagttaactcattattgctccattagaagcaaagagtgttgccaccttcatttcaaaatcccacacatttcaaagtcctacacaataataacaagtttaataccaagacatagttatagatttttagttttgtattagcaagttttttgttctgcgaatgtttcagaatcctaaattgaactgtgtttctgattcagatcataaccatcacaaaaactcataatagatcaaaatgttcgtatatttggcagcatgatggaccatgggtgaaaatagtgacccaaaacatttagctgtcttttagtttcagcagaattttttttaaccactttgataattcaacatatgatcattacaatcatcaggtttagtataaagatacagagatgcacatcaaattgagcaacaatatcttcggttctctttaatattttcctcttataattgaattatagagtatcaaatgaacacctcaaatggtcaaatttcatattaccattgagtcttgattatttcaagatcaagccatcatgcaaaagttaaaatgcttccatcaattccccacaaccaaaagtacaagacaatatatatttaccctgaggcctccatgatgtaagcttcagttttcttatacctacagacatcctcaaatgtaaaacacaattccaaaaggcatgccttccatctgacaaatccagggataaaatctcaattgctggcaccttggttatgtcttccatcgagtacggacaccacccatgatctacacaatcaacacggtttcataaacataaatttagcaaaagacaaaggatcaaattaaactttcaacactttagccaaatgcatgttgaaaatgacaaatattcatgactggaaagagtatctactaaaaaataaaatcagattatgggcctcaactttttattttactatgctataaggaaatgtagaaactataatacttcctaaacacaaccaatagcacactgaatttttcatgctaacaattaaaagatggagattaaacatgcccaatgatggagattaaacctgtagcctcaagaagctacaggtgacatgctgatagttacaagacctgagcgaagcaacatgaatctgagttttgcataggcagaacaacataaattatcagcagtgtcttactctatattcctcccattcatgcagacccagaacctccaaaatatcacatatttcaccacaatagttgttacaatacttaaaatgataaattttctgaatgaagaatcacgtacactaccaaagtattttaataatgttgaaaaataatgttgtgtaaaggtcaaagaaattcaaaaccaaaacatgcttcatgtctggatttgactacaataacctcgaatcaaacaactcataaaggattttcgctagaagcataagttgatcaacctatattctgaatgccattgtcaattaaactcaactctaatttgtacagatgtatataggaaaaagcaacagaaaccgatgtattctagcaaatcctctgtcagattgaagagataagaaatatatatttattcataaaaatggccaatacttttttctatgaaaggctacctttctaaaatggctcatttttgatagttcctaaccaggttctaagcagccagaaaccctgacatttctatctatcagcctatgacattcctacaaactagttcaattcactccaacgaatctaactgcatgtgcttcttcaacaagttctggatcctatccaacctgaaagcaaaagacatttaaatcaaacaggctcaaaaccagactgccgaacaaattgcaaattgtggggaatacggcacccgggttcctcacggtagcagcccaagttaggcttcgggggtgggccaagggcccatgaccgatatagtaagtctaacatagttgggcaatagagggagattatggtaacagatccccaatcatgtaatagatggcaagtatccagattgtgaggatacggggccttgattggcgccggcggcctgagattgtataaaggaggccggcgcccttccgaaggccggatcgtctccacaacccgtgggtcttccttggcttctcagttcattttccacccagatacagagaaaaaaacacactggacgtagggtactacctcttctcgagggcctgaaccaggataaacacctgcgtcaccatctctccttgatctagcgtaccccgtaaaatatatcgccgatactagaaatcgacagttggcgtgccaggtaggggggcgctcgatcgttttcaaggcggagatggcacctactggctttgagatcgccagcaccaccactttccccaccgccacccaaatctccttcggcgcattcgacttcctcgccgatagtgccggcatactccgtcaggtgagcccaggggtcaccgggccggttatggcttgccgctatgctccaggaaccaggttctccttcagcagtctcgacttcatcgccactggctccggcgtcctcaagctggccccaggggagcccgcgccaccgacgaccacaccaaccatacccctcggcatcaacaacttcaccgcttccgctgcccaagcacttcaggccggcagaatcggcaccagtgttttagcgaatgcctcgtcttcacaccgctcgggacatcatggcagctccaagcgtcgacacagggctccctaaaccggggattcaccgaaacaaacaaccagcaaacagcttttaaagggaagggagatagactgtgcctttctttcatttattttttcttttctgcaaggtaggggggccttgagagttcctcttgtggtagcaagttacttcataacctgctcaatttggccttatagggtcgggaactaatgaataaaaagggttggataccgcccaaccacccagccctctaccatatctagacaaatagaatagtccttttatacagagcgggaactcggatcccgttgggtcgacttcctcgacgaatccgcatacccttccaacttgggctcaggaagttcgaacaacacgccgacctcaagccatccgccctgcgagatcttcatcgtctttcaagagacagacgaagaaaaaagggaacgcgaagaggaggaatgtcgtatccagcaacaatacgaggatctcactcggtgcctcaacgagcttcaacagcgcagccatctcgccgaagacgctatccttcaagtgaagctggggagcacgacatcttcaccacgccgcagaacaagatgatcgctgccaaggccctcctcgacaacatgccggtcccagtcaacctggccgtgaacaccaccatcgcccaagtgaaggccatggtggaagccgccgtcgttgttaacgaccaaatttcgtaagtaatgaactaggtttggcattggaatcgaagtggattcggcgaaggactgtgttcgaagaatagagtgtgcatcggctgcagaggcatcggttgaagtctgcatcagctgagatggatcggacaggggacagccgatacagccgatttcattgagatggttataaaaccgtttctggaatcgatcaaggtgctacgaaaggattgccacgatggagataagctctcagataggcaattgtatctattaattaggatattttacgaagtttccttagagatatgtttgggcaaaagtctgccgtaaagacttatatgtatcttagagtttgttagagataagagtcgtgtccggcaaggacttatcatgtatctcgggtataaatataacccgaccccatgtaatttacaacaacagttcaataacactctcggcgcatcgccaccattttactttcgtttgtttcgacgagttcttgctttcgggttgagctgcatcgatttcgatcttcaataagaggtaaacttgtcatgacggcttgcgttctcgggattagtgcttccatcattatgatactctaatcttgtttatgtaattcgtcgagttatcatatatgcttcataatcctcattagttgcgctatctaacttgcaatcggccaatttctactgttaggaattagccgatagagttagatcttgttattaatttagattatatagcatatttaccatctcttagaggttttcatcaccttgtctagatcttatatttatttttatgcttaatgctgcatcggttgagttcggtctgttaagtaatatctataactataatatctagcttattttatgattattgaaagagatagcatcggggtttcagccgatcttacctgatttagctatcttataatttatatgctcgattgctatgctaaatctgccctttatattaagatattattgcattagaatatattaggctttctgtttaatatattttgtttgttttagtatcttaatatagagtgatatcagagtattagccgatacacattggatctatctccatcggctaggctatgagtgtatataatctttatcttgaagtacttttggatataagtgatttatactgtcttggcatgatgaccgatctatcccaatcactttaaatatatttcaagacatagattatatgttattgatatctacagccgatcggatagatctaattttatcttgctttattctttactgccgatcgattccaacatgacatcggctcgaggataaacgatatgtcatcggcaaccagccgatcggctatcgtttgtggatttaaccttgtttttttgtctttctttcttgttgattataggatcaaatcaactggcacgcctttgaacccaagagcaagatttaggacctgcacagaagttaagcagagctcccaggccagtgtgtgttttttgcatcaacacgcttttggcacgcctagtgggaccgagttgtgacatctttcatcatggtggacatcaggcagacatcaaagccaccatccgactctactcaaaagccaccatctgaccttagtcataagcagtcatccgatgtcggccctgacaacatcatcccaataactatggataaactgacgtcggagcagaaggcagagtacgagcagatgatgaacaatttgcataattagttcctgcattcatttaagcaaactcgctcgggcacagtaatccagaggtataagctgaaggtcactcaagacacggaaccaagcacatccaagggaggcaagacttccaagggtaacaaaggcaaggatgatgaactaggagaagacaagtcaaaggaagaagagcctcaagaaccgacgaatttgcaagatcggattgactatgctgtctatcatgccttgatcaatcaatcaggagtgctagttaatacttttaactaatatgatcaagtccgtggtcaatggtacaattgctgagcatcaagctaatgggccggtttttcttcctgaaggtggatttccaccatatagagagttggtgaccggcacgcagcagcctgtttctggtgtggctctagggcagccgatggcgtcagcttcggcccttggaagaccaggtgcatcgtcatcggcacagaggcaactgttagagccttaccttttgagcagacaccaacctgggcacacatggcataatatccctcggttgactccagaacaaattgcggctatgttcaaaaacaatcagcaaactatagagccaattcagccgataccaatgggacagcaaacacctaccattccacagcctcagcccgttggaaatcagtttgttcccggttagcaagttcaccagtctcctcagcaacatcctagtggtaacattaattttcaataccagcctcattcacctcaagtgcaatatcggctagggggatcaccacagcctcaggttctgccccagtataatcagttcgagcaaatccaaaagccgatgcagggagtgcctcaacagaagccctgggccgatatgattgcagatgtaatgaaggagtagtttggtctcaagccaagggacactgaaaatttgtatcggcacccatatcctgagtggtttgagagggttccattgccaagccgatacaaagttccagatttttcaaaattctcagggcaggataatgtgtcaacttatgagcatgtcagccgatttttggctcagtgtggcgaagcattggctgttgatgctttgagggttagattatttccgttatctttatctggattggcatttacatggttttccttgttaccttataattctgttcagagttgggccgatctagagaagcagtttcacagctatttttatagtagaaatcatgagatgaagctttctgatttaacagcagttaggcagaggcatgatgaaactgtacatgactacattcagaggttcagagatatgaggaacagatgctatagcttggctttgacagattctcagttagccgatcttgctttccaaggtttgatagccccaatcaaggagaagttttcggctaagactttgaaagtctgtctcaccttgtacaaaaggtaactttgcatgagcaaaggtttgcagaggccaggaagaattttaagaaagtcaatcatgtatatccctatatgtatgagtctgaagaagatgattctgaagtagcagcagccgagtgggcaagaagcaaggaggttgtcacttgtcaatgggtgaaaagttctaggaaagaggagaaatatgattttgatatcactaaagctgacaaaatttttgaattgctacttcgggaaaaacaaattcaacttcccgctggtcatataattccatcggctgaggagttggggaagatgaaatattgcaaatggcataattctggatctcatactactaatgattgcaaagtcttcaggcaatagatcctgttggctattgagggagggaaaataaagtttgatgactctaagaagccgatcaaggtggatggccatccttttcctattaacatggtgcatacgtccggaaaggcagccgatcggggtagtcatcggagctcacagcttaattcagccaagattatcaataaatatcaaagaaggtgtcacgtcccaaaacgaccctaaaatatatcctctaaatggtgcctagaataattaaaatccgtgtgaaagcctccaacaattaaaatgtgcaaagttaaaagtcaaacaaggcttagacggtttttgtatatttcctaaaagcctaaaatgcgtaaataaattttagtggaattttcagagcacaaataataattattaagaaataaacaaagttgaaaaggttttataaaaagaaaagctctaaaaagtcccctttccctccctctccctctcgggccggctcggcccatttccctccccctccctctcctctccccgcggcccatccggccttcccccgcgcgcgcgccgctgacgggcgggcccgcccgccaccctcgctgacgggtgggccccacccttcctcccgccgctcccgccgcctcgcccgcgccctagcgccgccgccgccgcgaatcccgccacctcccgccgtccccgcgcgcaataaagtgggggggaattattccccgggatcccctcccccttttcccccatttttccctccctctctcccttggattcgtttggaaactctcccctaacctcgccggcgccattaatggcggccgggtctcccgcgcccgtttccccctcctccggccgccctctctcactcccaaccctatataaaccctccacgagctccccaccaccgtttccgccactcgccgccctctctccccgccggaatcgagctcgcgctgtcgctctctctctccgccgtcgccgccgagctccggtccgccgccgtcgtcaccccggaccacctcccacctcggcgccgcctccttcggcttcgccgcatcctcgccgacctcgtccacctctccgtttcggtcgccgaccaccggagcaccgtcgaccccgtccacccgagccgcgccgccgccttcctccgctccggtcgccatttccgtcgtcgccgtcgacccggggtgagccgtggaccgccgcttcgtttccctctttccctcccctctctcagccgccgctccgccgtgcctatggccgccgccggcgaccataggggcgcgggcgcaccgcctcccgccgctgcgctggcgtggcctccttcgggcgcaccgagcggctgccgcgtggggcccggccgtcatccgcccgctccctcgggtgcggctgacgtgtgggacccacggcgccggccggtgtgagcccgggtgcacccggtccaccgtggaccgtgaggctgccgcgtgggccccactcccgtggacccggtccgcgcgcccctcccctcggctgacgcaataaaccctttttaaattaaaatttaaatgaagaaattcgcaaatattcatttaaagagcatataaacttcaaatgaccataacttggccatttgaactcggaattggaccgttcaagtctctaatttttccttaagaagtcaagaacccatttttgtgctttgttcctgcttgttatatggagtttattagagtaaaagccttttcttttccgttggtcgtgtagacgctgcagcttcggaagatccgctcttcgtggaagttgaagccgacggttgggaaagcgagcaaggcaagtcacatcatccttgaacatattgaatcccagtttataaaattatgttgatttaaattattgcattatcgctttatttaaattcccgcgttatcactgttttatctagccatgcctatttacctttgttatgaccttattattgttattgttattatttccttgttcaccctagaataaacaaaaccccaactagtgggcactctactcatggtactactagtatgattttagttagatgcttcgccgcttaattaggcaacattaggtggttttacaactctagactttgggatattcatatcacctggacactatggaattgtcggattattgtggaattggattcacacctccccctctcttcaaaatcctcaaaatggttttaggctgggctcggggtgcatggttttgatagtagcacctcagccatataaggaccggtcttcgggcctctgttgcaaagcactaccgtacttccacatgtttagtgggtaaggcttagtttgtggctcagtctggttataaacaaaagtacacggatggagatggatgaagtcgggggtcgatggacatctctaggacaaatgaaggctacacgagctgcggcccggtagtcgagatgtcgtggcatagggccggtgtcctgctgctaggggctcagtcctgcctacctgtcccgggggttccggccgtaggtggggttgggtcggtactcttgtctatggctaggatgggttggaaactatgtcacgtcttccgtccgtataccgtggtggtatgtggcacgtggttacacgtgaggaagatgtgtcttgtgggtaaagatgtacacctctgttcagagtataatctattcgaatagccgcgccctcggttatgggcaagcctagcaatgtacccaagttagtgttttaattcttaaaacctgcttaacaactaaaatgtggaatggttggcctgggttggcttgggacgagctgggacccagggtcgggttgccagttcggtctgaatcatcgtaggccttgggttaaggcaggttcgtgtgggttcacggccttgattaataatatggtatagctctggaatcgtgtttacaaaatagctttgagcaactaattatcttttaatgctgtttactgcaaaccctaaccctttatattataacccccttgtactcctgtcgcgactgagaaaatttgcattttcccgaacgctagtgtattaatccccgtcccaggaaaagccggggtacaccacacaaacatgatataaaagacacatctttattatatcgataatatttacattattacaaaggcacttcaggcctggcaatcaaaaataaacagcagcggactagcgggcctacggctccatcttcacaggcgctcaactggggtataagccaggactccacctaagacatcttctccaaagcctctcttactgaagaggggaaagattgagcaagagtgagtacaaccacagtactcagcaagccacaccggagatgcataattaatgcaagggagtacaaggggataataatataggggttaagttttgcagtaaacagcatttaaaagtcacttagttgcccaaagccattttataagacgatcctagagctacacagtattattaatcaaggccgtgaacccccacgaacctgccttaacccaaggcctacgatgattcagaccgaactggcaacccgaccctgggtcccagctcgtcccaagccaacccaggccaaccattccacattttagttgttgagcaaattttaagaattaaaacactaacttgggtacattgctcggcttgcccataaccgagggcgcggctattcgaatagattatactctgatcagaggtgtacgtctttacccacaagacacatcttcctcacgtgtaaccacgtgccacataccaccacggtatacggacggaagacgtgacatagttcccaacccatcctagccataaacaagagtaccgacccaaccccacctacggccggaacccccgggacaggcaggcaggattgagccccctagcagcaggacaccagccctgtgccatgacatctcgactaccgggccgcagctcgtgtagccttcatttgccttggagaatgtccatcgacccccgacttcatccatctccaatccgtgtacttttgtttataaccagactgagccacaaactaagccttacccactagacatgtggaagtacggtagtgctttgcaacagaggcccgagcttaatccttatagtggccggggtgctacttcccacaactggcatgcacccaaaccccaccgaaaaaacaggttttaggggctttgaaagaggaagagaggggtatgtccaattccaccataagccaaccattccatagtatccaaatgatatgagaattcccaaagtctaaagttataaaatcacctaatgttgcctaattaatcagcgaagcatctacctaaatttatactagtggaaccatgaatagagtacccactagttggggttttgtttattctagggtgaacaaggtaataataacaatagcaataataatgtcttaacaaaggtaaataggcatggctaaataaaacagtgataacgcgggaacttaaataaagcgataatgcattaatttaaatcaaaataattttataaactgggattcaatatgctcaaggatgatgtgacttgccttgctcagagagaacggccttccgaaccttcggcaacgaccacgaaccacgcttcgggaacctccggaacgacgaaagctacacgaagcacacaagcaaagctacaagcctaaaaagaagcaataacaatacataaaaagaaagcacacggttctttaggttatacaaacattaggagacttgaacgggtcgattcagagttcgtatgaccaagatatgatcatccgaagtttaatgctgttgtatggagatttgcggattattataattaagctttgcaactttaaaacatgtgtaagcgctagcctggaaaagacaggaaggctgcgccgttgacatgcggaccccacatgtcaacctaaaggaccgcggtagaccgggtacacagagacggtccacgggtcgacggaagcggaccgcgtgtgtcaaccgaggcgagtggccgacaaacggagtccactagacaccacacgggctgcacacgtggaaaccacgcggctaccgagcgggcacactaacacggacactacacggtcaccacccgcacacgtgaacgactaccgacaccggtacacgggtaccggggtcgacgaccgcacaacgggtacggggcgacaccgaaaggacgaggacggggcagcgagaggagagagatccttaccaccacgcgacgaggcgcgggaacgacaacgacgaacgggcgcggcggagacagacgggcacaacggagacgaacggcgaggggacggcttcggcggcgatccttggacgaaggcgagacgcggccggcgcgaggcttgacgacacggagccgaggacgaagacgaggacggggctgcagcggcacacttgacggacgcggacgagacggacgagaacggcctgacggagggacgaacgccacgacgaccgggaacgacgagaggacgacgacgacgacgacgaccggggccggcgaggaggcgacgaggacagccggcagcggctgcacggggacgaggacggcgtggaacacgccgcagcgatgatgatgacggaggcggcgccgcgagacgacgagccgggcgaccgacgggacgtcgatcggcgaggacgaacggtgacgaggaaacgacgatggcagccagcagcggctgcgcggaggaaggggacggcgtggaacacgccgctgcgatgttggagaaggtggtggtgcagcggggcgacgagccgacgaggaggaatgggtggccgaaaggacgccggcgacgaagaggatggagaggccggcgcggcgacggcgttccggcgaaaccgaggagcagccggggtggagggcggcgtcgcggagccgagggaggtggtggcgacgtcggccggcgcacgggaaccgcgacagtggcagccggaggtggaacagtggcggcaacgccactgttttgccggcgaggacgcgtctccggtgctttccccgcgaaacggagggctgaccgagggagaggaggtggctgcgaggccgagggagaagacggcgcggccggacggtgctccggcgaggagggagaggcggctggaggcggccggcgcggaggaaagagaagggcgacggtgggaacgcgcctccggtggtcaccgcgcgaaacggagggcaggccggggtggaggaggtggcggcgacgctggaggaggcgacggcgcggccggccggcgcacggtcgaggcggcacaggcggctggaggcggccggcggcgtgggagagagaggagggcggcggggagatggctagggaccacggggaggctcgggagggggctaaaacgagagaacgggggatgaggatcccattttatatgagagaagagggagccggccacgggggaggtcggaacggcggcgggaatggcggccgacggccatggaaagcggccggacttggcgcgtccgttcccggggattgaaggcacgaatcaagggggaatttgggggcaattgaagaggattcaatggggattaaaaccccccaactaattttggaattggccaattgaatcaagcggatttggaggagggagcgagctaggtttccgggagggagagagggaggtggccgggcggctggaggagggagacgacgcgcctgacgcgtgggccccacgcggtcgggcgcgcggtcagcgcgcggcaacggcgcgcacgcgcgcgcacgtgcgcggcacgggcgggagggcgccgctcgggttgggccgggcggccggcccaggaggagaggagggggaggcggcttgggccgggcaggccgggaggggggggagagacagcccgggagagagagtgaggagggtgctgggccgaggggaagggggcccaagaggagggagagaaggagagggagagaaagagagggaggaaagggagacttcggccgcgggccgaggggagagagggaggactttgggccagacttggcccaaaggaggaaggagggttatttttaggtttttctttttaataaactttgttaattgtttttgttgcttaataattatttccggtgctctgaaaattcaagtaaaatttgagggctccttttagaccaaggagaatttaacaaaaattccccgggccacattcgaatttttcttgtacgcattttagtgtttgccaatttcttttcgaattttaattaattctattattccttttagaaaataatttttattttgggatgaatttatcaggacgtgacaaatccaccccccttacaagaatctcgtccccgagattcgaggaggctagcaagaagataggttgggcggtcttctcttcttatctgacttcttccgctccgtcttctataacaaacttgcctagcacaactcccccactctagactgcttggctcgatctcctgttgcagatagaatcttctcttcacctgacttgtccctggttgaacctttagctgacttcgactgggttgtggcacttgatgatggggcttcagatccagaacttctcatagttcgtatctttggcgtcagcctcatacaacttacccacttcatgtcacgcgtcaacactagcttgtcattactaggataccatgcttgtcatctacttctaagttgccacaaactgcctcatattagttttcctggtctccgggtgctagctacttctgctatgcgatgcgagggtcgataattttcgcctttcaattatgtttctcaacagagtcaacttatcccacttgacatgctttgacgcctttccagatgactttactgctggacttgttattgtttgatcgttaccctgccaaatctgaagcttcgctgttagatgcgattttaatctgacctctatagactatcttcgaacatatcacttggttcataactgggaatagttcccatgaacagacaactcggattcactttctttacattcagtttacttcctgctattctcttcatgttgtcattatttagcattcaaagtattccttcacacattcaaccctgatgtattcttttcagatttctcgtatcaatcacctttcgacctacttctttgcccgacaataaacacctttgctggtatcttctatcagtcacctttggaactttgtcaaccaagtactcttcactccgagagttgtggatgcttctggtgacgatgtggtcctttggtctgctgcctttcagtgaaaccttgaagtgttttcgccaaaagctatactgactgtcattgcctttgatccgaaaaagacatgtctgaaactctcagtccaaacaaatgtctctttggttaatcgcttgattttcttttccatcatcaggttggttattaactcgaggttagaacatggttcctctgaaatgagaccctaggtctcctttgacagtaaacaattatacacataatcccatatcagcatcttccgaaataatcctcatagaacttgtttttattacacatgtctcccttattacatgaatgcaaggccttgccttaaacaaaaagggaaggtgcttaacatcagtacattgcatcctcaacatgaatcttccataaacataacaaactcattgtttataatcatgaatgtatttatttattacatgattgctgcaaactcacgattacacaatgataagtagcgaactgaaaaccacaaacgtggctactcattttgattctggagagatatagctggcattgtcctagtgactgcatccttgattggttctgtgatgatgtgttaggactgcatattgctatcattcacaggagaagcttccttctgattgctatttgaagcagataacggtcttctgcttggtatcgcactcctgagattgattgcccttcgctcggcctggagtaggtcggggagagacacaacttcttccatcgacgacaattctttgctgaggccgtcggtgcagagaatggttggtgttgaaggtattattgctatgatttactgcagagtcaggtgcagcaggaggagcattggtgctgtggatgatatcgtcgaggttgctgttggagctgactagctgatgagacaatcgtagggttgttcgttggatttctgcggtcttggtcaacaacacactgagttggcaatccttgggcacatggttggtaccttcgcacagaaaacatgtgaccttgcgggtgggacattcacctggtggatggtcttcttcacaatgagggcagagtgtgagacacctgctagcaatgtgtccaatttctccacaacgggtgcatgcctttgattccatctcttcctcgccgagatgtcggggagactcatcttcaacatccgaggagacttgatctgacccttcactatcagatactctgccaccatggcttaggaggtgctgggtcaactgtcgtgcacctcggaaggtatttcctctttgacgtctaggaatagttatccctgctggaggccattcggtgctggtaatagtcatcttacgtacttcttcttcagttcgcatcggtgcttttctcttctgattcttactcttcttgcctttggcttgcttagtacgtgaccccacgtggtacgaaaggctaggaggaaagcaattcccgggattcaatggattctctccattgggctctctactttgcacactaggctgcaagcttgacttggtgcgaggaggctggtttagcgatgtctgccctgttaaaccaaaggaaggggcttctttggcatatacccatggacaattcaaggcatagtgtccttattctctacaatcatgacaaaaggggacatgctcttctggcattggaagctcattgatctgggtggcaaatgctcgatcaaacacatactgattttggtcttgacttccaaccaatggtagctgggaactaagcagcatgcttggaatggaccaagggtgtgccctggttaactctcttgaggccagtggtggattgagttgaaaacttgagttactggaggcataccctctgacattctttcctttttctctgttaaacatctgttacagggattgaggtgagagaggaaacaagctaggaaagaatagaccagaactagagacaggaccttaaaggaactaactcttcttgttgatgtgttgtttgtttcacttattatgcaagttgattaagcaaacaacctagcatggttacatcacaacccaccgatgcaaaccacgcgctacacacacaagcaaggaacacacgactaacaacactaccctatagggtggcttaggttctgcgacgggttctccaagatcttcactccttcacagctggcttcactgcttcctccacttcgctagcggatcctgcagtcttccggagcttcggcgaacaactgacgatgtcttcttcttcactgacctgaccatctagtactagttgaaatttgaagaaggaagaaaagggtaaacattttgcaaatagcataggggaaaggaggaaaaaggaactttcgcaaatagtttcatttataaaatatgtccttaggttttatccacttggcttatcctacagtcaagatggctctgataccagcttgtcgcgaccgagaaaatttgcattttcccgaacgctagtgtattaatccccgtcccagaaaaagccggggtacaccacacaaacatgatataaaagacacatctttattctatcgataatatttacattattacaaaggcacttcaggcctggcaatcaaaaataaacagcagcggactagcgggcctacggctccatcttcacaggcgctcaactggggtataagccaggactccacctaagacatcttctccaaagcctctcttactgaagaggggaaagattgagcaagagtgagtacaaccacagtactcagcaagccacaccggagatgcataattaatgcaagggagtacaaggggataattatataggggttaagttttgcagtaaacagcatttaaaagtcacttagttgcccaaagccattttataagacgatcctagagctacacagtattattaatcaaggccgtgaacccccacgaacctgccttaacccaaggcctacgatgattcagaccgaactggcaacccgaccctgggtcccagctcgtcccaagccaacccaagccaaccattccacattttagttgttgagcaaattttaagaattaaaacactaacttgggtacattgctcggcttgcccataaccgagggcgcggctattcgaatagattatactctgatcaaaggtgtacgtctttacccacaagacacatcttcctcacgtgtaaccacgtgccacataccaccacggtatacggacggaagacgtgacatagttcccaacccatcctagccataaacaagagtaccgacccaaccccacctacggccggaacccccgggacaggcaggcaggattgagccccctagcagcaggacaccagccctgtgccatgacatctcgactaccgggccgcagctcgtgtagccttcatttgccttagagaatgtccatcgacccccgacttcatccatctccaatccgtgtacttttgtttataaccagactgagccacaaactaagccttacccactagacatgtggaagtacggtagtgctttgcaacagaggcccgagcttaatccttatagtggccggggtgctacttcccacaactggcatgcacccaaaccccaccgaaaaaacaggttttaggggctttgaaagaggaagagaggggtatgtccaattccaccataagccaaccattccatagtatccaaatgatatgagaattcccaaagtctaaagttataaaatcacctaatgttgcctaattaatcagcgaagcatctacctaaatttatactagtggaaccatgaatagagtacccactagttggggttttgtttattctagggtgaacaaggtaataataacaatagcaataataatgtcttaacaaaggtaaataggcatggctaaataaaacagtgataacgcgggaatttaaataaagcgataatgcattaatttaaatcaaaataattttataaactgggattcaatatgctcaaggatgatgtgacttgccttgctcagagagaacggccttccgaaccttcggcgacgaccacgaaccacgcttcgggaacctccggaacgacgaaagctacgcgaagcacacaagcaaagctacaagcctaaaaagaagcaataacaatacataaaaagaaagcacacggttctttaggttatacaaacattaggagacttgaacgggtcgattcagagttcgtatgaccaagatatgatcatccgaagtttaatgctgttgtatggagatttgcggattattataattaagctttgcaactttaaaacatgtgtaagcgctagcctggaaaagacaggaaggctgcgccgttgacatgcggaccccacatgtcaacctaaaggaccgcggtagaccgggtacacagagacggtccacgggtcgacggaagcggaccgcgtgtgtcaaccgaggcgagtggccgacaaacggagtccactagacaccacacgggctgcacacgtggaaaccacgcggctaccgagcgggcacactaacacggacactacacggtcaccacccgcacacgtgaacgactaccgacaccggtacacgggtaccggggtcgacgaccgcacaacgggtacggggcgacaccgaaaggacgaggacggggcagcgagaggagagagatccttaccaccacgcgacgaggcgcgggaacgacaacgacgaacgggcgcggcggagacagacgggcacaacggagacgaacggcgaggggacggcttcggcggcgatccttggacgaaggcgagacgcggccggcgcgaggcttgacgacgcggagccgaggacgaagacgaggacggggctgcagcggcacacttgacggacgcggacgagacggacgagaacggcctgacggagggacgaacgccacgacgaccgggaacgacgagaggacgacgacgacgacgacgaccggggccggcgaggaggcgacgaggacagccggcagcggctgcacggggacgaggacggcgtggaacacgccgcagcgatgatgatgacggaggcggcgccgcgagacgacgagccgggcgaccgacgggacgtcgatcggcgaggacgaacggtgacgaggaaacgacgatggcagccagcagcggctgcgcggaggaaggggacggcgtggaacacgccgctgcgatgttggagaaggtggtggtgcagcggggcgacgagccgacgaggaggaatgggtggccgaaaggacgccggcgacgaagaggatggagaggccggcgcggcgacggcgttccggcgaaaccgaggagcagccggggtggagggcggcgtcgcggagccgagggaggtggtggcgacgtcggccggcgcacgggaaccgcgacagtggcagccggaggtggaacagtggcggcaacgccactgttttgccggcgaggacgcgtctccggtgctttccccgcgaaacggagggctgaccgagggagaggaggtggctgcgaggccgagggagaagacggcgcggccggacggtgctccggcgaggagggagaggcggctggaggcggccggcgcggaggaaagagaagggcgacggtgggaacgcgcctccggcggtcaccgcgcgaaacggagggcaggccggggtggaggaggtggcggcgacgctggaggaggcgacggcgcggccggccggcgcacggtcgaggcggcacaggcggctggaggcggccggcggcgtgggagagagaggagggcggcggggagatggctagggaccacggggaggctcgggagggggctaaaacgagagaacgggggatgaggatcccattttatatgagagaagagggagccggccacgggggaggtcggaacggcggcgggaatggcggccgacggccatggaaagcggccggacttggcgcgtccgttcccggggattgaaggcacgaatcaagggggaatttgggggcaattgaagaggattcaatggggattaaaaccccccaattaattttggaattggccaattgaatcaagcggatttggaggagggagcgagctaggtttccgggagggagagagggaggtggccgggcggctggaggagggagacgacgcgcctgacgcgtgggccccacccggtcgggcgcgcggtcagcgcgcggcaacggcgcgcacgcgcgcgcacgtgcgcggcacgggcgggagggcgccgctcgggttgggccgggcggccggcccaggaggagaggagggggaggcggcttgggccaggcaggccgggaggggggggagagacagcccgggagagagagggaggagggtgctgggccgaggggaagggggcccaagaggagggagagaaggagagggagagaaagagagggaggaaagggagacttcggccgcgggccgaggggagagagggaggactttgggccagacttggcccaaaggaggaaggagggttatttttaggtttttctttttaataaactttgttaattgtttttgttgcttaataattatttccggtgctctgaaaattcaagtaaaatttgagggctccttttagaccaaggagaatttaacaaaaattccccgggccacattcgaatttttcttgtacgcattttagtgtttgccaatttcttttcgaattttaattaattctattattccttttagaaaataatttttattttgggatgaatttatcaggacgtgacaactcccttgcatttatcctgcacttgtgggtgtgtcttgttgagtacggtggttgtactcagtcttgctcaatttttcccaaacccagaagaggagcccctagaagatgaaggctttggtgtctagctcgtgcctgccgtcaagcgcctgtggtcatcgccctagtcttccgctgtttctcgtttgtctttgtgtgtgctgggccttcgccgcccatgtaataaattaactatttacgcttccgcttgataaactctgaaatgtatcaacttttggtgtaccttgcctcctgggacaaggaataatacacgcacgtaaggaacgcccgttgggttaattccggtcatgacagaaggcatgacaagcagcaggacaggtatcttgaagaagatgatggtggttttgatccgtattgggattgtgagtttttcaggttctgctggaatgaagggatgaggctgccatcaatagaagattgccctggatgcagtgataatgcaggaagttcgagccgatcttataatagaggaaatcagctgaatcagaaaaggttgcctgttcattagaggttgggtccggtacaccaagagcattttcaggatgaagatgaaggcagaaattcacagtggtgcccttctggtatttttactaaaaatcagaagagaagggtccagaggattagaaatagggagcgttttcaggaggtacaacaagagatcaaccatcggctgaagaagacaaagaccaagcaggagtggcgcgttaagagcaaagtgctgtcagccgatgagattgaggccgacaaagcaaagaggctagccagaggaaaagctattgcatcttcatcggtaaacatggtgttcgtcctgccagtagaatatgaagctaatcaagccgatgtgaatgatgtggaagaagcttctgctgattaattttgtcaccagaacaagcaatttttgagaaatcagaggggacatagaatcggcatctcaagccattgtatgttaatggatttgtcaatgggaagccgatgtccaagatgatggttgatggtggggccgctgtaaatttgatgccatatactacattcaggaagttgggtaagaatgcagatgatatctgttagggttacggataaggtataccctcgacgcttggatgtacgttgtatactgatacagtatatccgcgcgtatacgggtagtttcctttcgcattcaggaaatctatcatgcgatagagatagtatctactgatggaaggagttctactcggacaagactgggtctttaccatatcgtgagtggtccgatatctccgagtcttatttggatatcatctgatacgcggtgtaaaagggaccccctgggcagaacctacggcatcgaatttcaccgccaacacatccaccacagcctatggagccggagcgtgcaggagccaagtcgccgggagatctagtcgaaccaactcgactacggtctcgtcggtatcatcgagttctgttattccctttgtaatctgtggtttccgtcatataatcccataccaactggattagggctattacctaccaaggggcctgaaccagtataatctttgtcttctgtttgcttgatgtcgtattacgtagatcctcgtaccaacggaccccaatacccaccatatccggtctacgggtatcccccgtcgacagtggcgctccgggtagggggatttgatgctcaaggttctactactatgacttcaagctccctcgacgacaacgtctaccccggcatcaaccaaggaacttcagcttcaacgatgatggtgtggactcaagtcggcgaaatcgtcttcccggtctacaccacgatgccgatctcgactggcccagtaatcaccagcagcaagaacgatatggttacgactctggacgacctcatgtcgaaagatcctcctgcaggagcggagaacggaacatcgacaacttccgcgcccgagaaggatcctagtgcggccagctcttgtccttccgacgggaagcacgagccgacaagaacaactcctgaggcgacgaggaccgggtcacaagacaaaagggcacgacctgcaaacttgcaaggtttttctcgacgtagaagctgaaatccgcgcctgcaaggagcgtggaattcaacatgcgcttccccaactcgtgatgtctattgccccattcacaaggctaagactcacgatctatcaagctgcaaggttcttctcagtgccatgaagacgtcgctccctaaggtcccgcagtcacgaatctcttttagggatgcagacaaggaacaaggtgcggcgactacctcagatcggttcgttggggtaatcgatatcgatccccacgagacatctgtcctacatctactcgaagattaggcctcatcatcgacgagtacgctacgtgacgtgtacgccatcgatgtaaccggcacctctagaggcggcaacacggaaacggaggaacaattggctacgccagcccaacacattagagccatcaatgcaataccgagggaaaccccttacgatcccgttctaaacgctgacctcgatcagtggacggaacgactacgggaatcggtggccaacatcagtaacgcgttcgaggaggccgctgccagagcaccctcgaaacaaccgctgacccgcggcgctgacgaagaactgcctgatcagcgggtgtcacctcatcaatctacccctccacctcgcggtgctagcgatctccgcgaccacctaaatatgcgccgagaagcgcgacacacgcaagacaacgaaaatcgttctcgacatcgcatctcttcgcaacatcacgagaacatagagcgacgtggacacccgagcggaaactgagaccatgatggtcgccacgaccgccgcgagcagcggctgccaggcgatgctagtcgaggtaaacgcaacaacgacgatagaggtcgacgccgggacaacgatgattggtgacgacgaggttcacgggaacccgggcgcaatccctgaaaccgtaccccggagccgagcgactcatcatcatcatcgtcatcggacagacatccacggcgagtgtatgatcgccgacaacccaccgcccctggcggcgggtgcgtggctttcactcgtactgtacgagatgtccggtggcctaagaagtttctaccgggagcaatagagaaatacgatggaagcaccgaccctgaagaatttcttcaggtctattccacaatactctatgctgccggagcagacaacaacgcattggcaaattacttgccagctgcgttgaaaggatctgcgcgttcatggctggttcacctcccgccctactcaatttcttcgtgggcagatctgtggcaacagtttgtcgcaaacttccaaggaacatataagcgccacacgatcgaggacgacctaaacgcgttgacgcagaattcgggtgaatcattgagggactatattcggcgctttaacgagtgcagaaatacgatccccgagatcactgatgcttctgtaatccgcgctttcaagtccggcgtccgagatcgctacacaacccaggaattggcgacaagacggatcacaactgctcgcaagctgttcgaaattgtgccaaggacacacctgagtcaagcaagaaaaagagtcgcaagaatgggaaacggaaagctcaagcggagatcctcgcagcaaagtacattgacccgcccaagcatccagacccacaaggcgacgatacgaggaaaacatggtgccctatacacaagtcggacaagcactctttagagacttgtctcgtcttcaaaaaggcactcgcaaggcaactagcgttggacaagtgcaagcgagtacgtgtagtcgagaaggccgccgaagcggctactcaggactcagatttagcataccctgactccgacctccatgtctcacacatcttcggaggttccacgctgtactcttctaaacgggaatacaagaaagtggagcgcgaagtttgttcgacatggcagggggctgcatccaagatgaagtggtctgaacagaagattgagttctctgaagcagaccaccccaagactgccattactccaggacgatatccgatcatggtcgagcccactattcggaatatcaaggtagcacgggttctcatcgacggtggcagctcaatcaacttactcttcgccagcacattggacgcgatggggattccacgaagcgagttgacgcccactgatcaacctttccacggaatcactcctgaatcgtcgtccaagctattgggcaagattatgctaccagtgaccttcggtcaggcaaacaacttccgaacagagcagatcacctttgatgtagctgagttcgacgcaacgtataacgccatcatcgggaggactgcactcgcgaagttcatggccgaagggaacaatcactattcagggcaacgcgaagctagcagtacagtgcgacaagcgtgcctcgacatggtcgagcaaactcccaacccgcccgccacagctgagccgcccaagaaagtgagcaaaccaacaagacgccgaagccagacagcgcaattaagatcgttccgctcttcggggcatcactggacgacaaataggaactcacggtcatcaccttcctccgcgacaatgtagacgtgttcgctttgtagccgtccgacatgccgggggtccccatggaggtgatcgagcacaaacttatggtgcgacccgatgccaagccagtaaaacaaaaactgcggagatttacaccagatcggaaacaagccatatgagaagagctcgataaacttctcaaagccggcttcatccgggaagttctccatccagagtggctagccaatccagtcatggtgcacaaggccaatgggaagtggaggatgtgtgtcgatttcaccgatctcagcaaggcgtgccccaaggatcacttccctcttcctcgaatagaccagttggtggactcaacagccggttgtgagttgttaagtttccttgacgcttactctggctaccaccaaatcagcatggcgaaagaggacgaggagaagatagcattcatcatgccgtttggtgtattctgctacgtcatgatgccgtttgggctaataccgctggaaacactttccagcgcacggttcagggggcgctcaatgaccagcttggacacaatgtcaaggcctatgtcaacggcattgttgtcaagactaagaaaaacaactcattgatcgatgatctccgggaaacgtttgacaacctccaacgatatcgcctcatgctcaacccagagaagtgcacgttcagagtaccgtcaggcaagctccttggattccttgtctccggaagagggatcgaagcaaatccctagaagatcaaggcaatcgagaacatgaaatcgccgacaagactctaggaagtccagaagctaactggatgcatggcggcactgagcagattcgtcgctaggatgggagagcgaggacaacctttcttcgccgtgctgaagaaacaagacaaatttgtgtgcacacaggaagccgaagacgcgttcatcgcactcaagtgctacttgtcaaatccccctgtacttgttgctccccaacctaatgaagaattattcctctatatcgctgccacgccatattctgtgagtactgtcattgttgtcgagagagagaaggtgcaaagacaggtttattacgtcagcgaagctctacatgacacaaaggcacgacgccgcacgacagggacgctacgctacacaccgggggctttatccctcacccacctggcgtggctcgacttcgcccggggcacacttagctacttcgcctgcgatgccacaccgactcaccacgggcttcgcctccctcgtcgtccgggtgctctacaccgacttaccacggactcgggggcttcgcttcctcgttgtctgggcatttttcgccgacctcaccatggactcgggggcttcacctcccgcgtcgtccgggtgctctacaccgactcgccacggactcggaggcttcacctccctcgttgcctgggcattcttcgtcgacctcgccacggactcgggggcttcgcctcccgcgtcgtccgggtgctcttcaccgaccttgccacgggctcgggggcttgacacccctcgctgcctgggtactactcgccaccaccaagtgatccgctccccgcgcaggatggctacttcatcgccgaccgaacgcttgcaccgagccgaccgcatacaccgccgccgggtgatccgctccccgcgcaggatggctactgcgttgccgaccgaaggcttgcacctccgagccgaccgcatacgccaccaccgggtgatacgctccccgcgcaggacggctactgcgttgccgaccggagccttgcaccttcgtgccgaccgcatacgccgcctctgggtgatccgctccccgcgtaggatggctactgcgttgccgaccggaggtttgcaccttcgagccagccggctacgctgccgccgggtgatccgctccccgcgcaggacggctggacgtctgcatcgctgcctggtgacttcctccccgtgcatgacggctgcaacaatttccacctggcaatgttgagatgagtactcagccagtcttgtctccaccagatggcttcaccaacctctgagtcttcatcaagcaaagtactcggaggctactgtgggatacacggtacccgggtacccaaggagaggactttgggccatacggcataggttgggccaagagccctaagcccatacggcatacatgtaaataaagaaagagagattcccgggataagatataaatctcggggatcatgcatatctttataaatagaatagggacatccagttgcaatcaactagatactttccttgtaacccttccccctcatcctatataagagggggcaagggtcctgagaggagaggccggatcgtctccacgaggcttcttcctcttctttgatcattttgactagagacagagaaaaacacacactggacgtagggtattacctcatctcgagggcctgaaccaggataaacacctgtgtcaccatctctccttgatcttgcacacctcgtaaaatatattgccgatcatagaaatcgacacaaatgtcttcaaaagatttgagatgacaacaaaattgagttaattgtccataaatttacatatttcagtatagccataagatccaaaaatatggctttacccaagttgagatggagacaaaccaaaggaaggagaaaactcaccgtatcgtggtaaccatctcactgcacgattatctgaatgtttaggtttcaccgcataatgggctcgtttgggacacgtaggcctctttcgtgccagcctcctcctgcgtgcttgatcccaaccgacgacgtcccagagctggtcttctccccctctgcacccaggccccatgcccaacctgctattttgagcgggagtgtggcattaatggcttttgttttcataccacggatgactgttgctgtgccaaaattgaagtaaaaaaaacatggaagcagcagtagtacgatgtacatttctgcacaaaaaaggtgacacatcaaggttgttcaatgaaacgggatatatttgtgggactgctgtgctgtgaagaaatgtatttgcttgagcactaaattttttccgaaaatgtattcatgattggttcactaatctaagggtatttatattgttatttccctcacgatcaagaaattgaataaaagaggggagcaggtgataaatcaataaattgacatcaactcatttgtagcaagtacagaaatattgtcttgtttcatatagctgtagcactaactgagacaaatcttctggggtttgaagagagcaacaacttgttaacatagttttggttcatatacttaagagcttccatcttgccaatatattagttcatagcaatttgtttaaagttttatcactcctttggatagactctgaactctgaagtaatatttttctgttgtacatcaaaatatattataagaaccatttagttttagatgttgatggtagccctcccttttgtcatgtctcacttgaaattcaggaacacaatggataagatgcatggactacttacatttttttgtcaatgaaatgtaggccatgcctcgggttactcatagatcaaagctccctaacataattgacaatgatcaagaacacaatggatctgaaccaaggaaactgatcacagatgcatgctactaatcacatatgtatgtactccactaagcaagaatatgttggaaatatggtcatatatcggcatattttaatccaaaatattaagacaataaccatggcatgaacaatgtggggtgatctagtgacaacatgtaacataaccagtaacatgcttaaggtatcataagcatcatgcacataccaaggacgcaattgacttgcgactagcacgactaatagcggtatgaacgaatgagttaacaacaggagaaggacataccccgagaatggccctctgctggattgtgaggcagaattgtctccgttggtgttgacgttcgcaacggctccggctcccggcgcgccatctccagagacagcagcggcggcgccggcggcagctccggctctggctccaggcgcagacatggtggacgagacaacaacgaacagagtagtcgtgcgggaagcactcccaaaaacctgatcacccgcctacctggtgcagatctctggcgaaggtgtagttccggaggccctgctccttctgcgcgcaagcgatcagaagcgaggaagcgaaacagcacaggcgcacgcggaggaggaagaacaccagggagaggaaagcaagcgaatcattctgatcggactagcggcctccttagatagaaggagagattccgcaagttgcagcacacgcgtcgtgggatcgtgggatcgtgcacgcgctattacggaggcagtcgtgggaacgtgggatcgtggttgcaaaagaatagagacgtgacgtgacggcacgcacgcccgccagccacgcctcgcccacgcccacgccctggcccggcgcgcgcgcgcccgcgcgtgtggctttccgactcccacctcgaccggtcaacagggagcctccaataactccctatttaggttgagatactcctcacttaattcctaaggtggtattattatccttaacacttattatggacctttgagatttaatagaataaatcgggcctagcccaattattctaacaatccccaccaaatttcaaggctcataaaaaatgttctcaaggttgtgcctgtttgatatacctgtgttttggtggagactgttaagttgaacttccacctaggatatgagctacatcagaccacaactgaacaatggactatgccttgaattgtcagtcttgtgtgatcaggtttcactcaaacccttgactggtactgggctgccgttcgcatcccctctgtttggagcatataagtcaaactccaggcctttcatgagtatctagagatcgcccaaacctcatagactgtgactagcagtcgaactcatataggtgtgttccttctgagatgttctgcaggtcaacatctctgcttgaaaaagccactcggatcacattaaggtatgagccatcctaccatgcagaaaagaatagaagtacatcatgaaaatgagcctttttcaagggtctcttctctctgtcacacaatagtttgtttcaccatctaaattcacgggatctccgatcacaatggacaggtttccactattgtgcaaccttaggtgggtatcaagcccatttccctcgatgcactgtctatcacattacatggtagccccttggtaaactgatctaccaaatttctagccgtttggacatagtccaatgctatcactccggagtttttctgctttctgacagatttcagtcttctcttgatatgcctagatgacttcatgttgtcctttgaactgttcactttaataatcactatttgattatcacagttcattaggatagctggcactggtttttcaaccaccgacaaatccatcaggagttcacgaagccacttggcctcaactgtcgcagtatatagtgttgtaagttctgcttccattgttgacctcgttaagatggtctgcttgaacgacttccaggaaacagtgccacctccaagtgtaaacacatatccacttgtggcttttatctcatcagcatcagatatccagtttgagtcactacacccttctagtaattttggatacccagtatagtgaattccatagctcatagtgccctttagatagcgcattactctttccagagcctgccaatgatcatctcccggatttgagacaaaccggctcagcttgcttatagcaaatgagatgtcaggcctcgttgcactaaccaagtacatcaatgaaccaatgatttgagagtatctcagttgatcccttgctattcttcggttttttcttaatagcacgctgggatcataaggagtaggagctggcttgcagtcactatatccaaagtgactcaaaaccttgtccacatagtgggattgcacaagtgtaatcccaccctcatctcctctttgtagcttaatgttaagaataacatcagcctctcccaaatccttcatttcaaaactcttggatagatagtccttgacctcctcaatcacattgaagctggtcccaaagatcaatatgtcatcgacatataagcacaagatcactccttctcccccaccatagcgatagtacacacatttatcagcttcgttcacaacaaagcctacagatgtaagcgttgtgtcaaacttctcatgccattgcttaggtgcttgcttaaggccatacaaggatttcaacagtttacacaccattccctcctgaccttctagtacatacccgtctggttgatccatttagatctcctcctccagctctccgtttaggaaagctgtcttaacgtccatctgatggacgagaagaccatgagaggctgccagagcaagtagtactcgaatcgtggtcaagcgagcaactggtgagtatgtgtcgaaaaaatcctcgccttccttttgggtataacccttggccacaagccttgccttgaacttttcaattgtaccatcaggcctaagctttttcttgaaaacccatttgcatcctacaggcttgcacccatatggacgctcaacgacttcctagataccattagacataatcgagtccatctcactgcgtactgcttccttccagtagttagcgtcaggagatgaatatgcctcttctatggttcttggggtgtcatccacgaggtatacaatgtagtcatctccaaaggattttgcaaccctttgtctcttactcttacgagtatctacaacgttgtcctcctcaggattttcctcaggcgtttgatcattgtgttctatcggtgcaaagtgcttatggggcatgacagtttcttgactagaagtgctaggtgtatgtttcatgggaaattcattctcaaagaatgtagcatctctagactcaataattgtaccaacatgcatgtcgggtactccagagtttactattaagaatctataacccacactgtgaatagcataaccaaggaacacacaatcaacagtatttggtccaagtttccgctttttggctataggtacatttaccttggccaaacagccccatgttcgtaggtatgagagatttaatttcttcctttcccattcctcgaatggtgttacttccttatgcttcattggaattttattcaggacatgacacgcagtcaaaactgcctcaccccaccattccatggaaagccccatagtgtctaacatggcattcaccatctcagttagagtacggttctttctttcggccaccccatttgattggggtgaatagggaggcgtcctctcatgaataattccaaactcttcgcaaaaggatgcaaactcattcgaaaaatactccccacctctatcagacctcaaccgtttgattttcctttcaagttggttttctacctcagctttataggtcttaaagaaatgcaatgcttcatcctttgttttcaatagatacacataacaaaatctagtgcaattatctatcagtgtcatgaaatatttctttccccctttagtcaacaccgttcatttcgcaaaaatcggaatgaacaagttctagaggtgccaaattcctcgcctcagatgccttgtgaggcttgcgaggttgtttcgattgaacacaagtatgacacttagaacctttgaccaaagtgaattttggaattaaactcatgttagctaagcgcgtcgtacaaccgaaattcacatgacagagtcgcgaatgccacacattagactcatcattctcgctaatatggttcacaacattatgattattacacatgtcattcagagaaaagcggaacaagcctccgctgtcataaccttttccaacaaaagttccatatttagatacgacacatttattggattcaaacacaagtctaaaaccttctctacacaatagagagccgctaacaagattcttctttattgaagggacatgctgcacgttcttcagctgaacggtctttcccgaagtaaacttcagatcgaccgtaccaacaccatgaacagctgcaagcgacccgtttcccatcaacaaggaggaacctctcccgacctgataagaagaaaacagagaaatgtcagcacatacatgaatattagcaccagtatccacccaccaatcaggtgagtgaaaaacagagagaactgtaggtaatattttaccgtaccccgattttcctccgccctcgctaatgaccatgttggcagacttcctgtctttgcgctcaggacagtccttggcccaatgcccggacttgccacacacaaagcagtctccctttgcctttcccttgcctttcttcttaaagttggttgcagccttgggtttgacatcaggcttgactttcttgttgttctgggatgcatgagggttcttcttctataccatattggcactagaacctccctcaacctttttgccccggttgtcctttgccctcgccttctcctcaacacccaaagagccaatgagatcagaaacactgaactcttgtctcttgtgctttagagaagtggcaaagtccgaccaagaaggtggcaatttggcaataatgccacctgccacaaacttgtccggcaactcacagttgttgtcctcaagttccttagccagcatctgaatctcatgagcttgttctactacagaacggtcatcgaccatcttgtagtcatagaattgctccatgacatacagctcactgccggcgtcggaaactccgaacgtggcctcaagtgcatcccacatgtccttcccggaaggcatgtgcatgtacacgtccactatgttgtgagcgagtacactgatcagtgctccatggaacaggcaatccgaagcctcgaacttagcctcttcctcatgagagagagatggttcacttcgtttgccctgtgaaacacagaagcattgcatcgctgtcaaccacaatagtgcacgtgctttccacctcttatagttagaaccatcaaatgcatgtggtttcagtgcagcagcaaagccaactaccgaaaatgacctatcaggtttttggattgttggaaatatggtcatatatcggcatattttaatccaaaatattaagacaataaccatggcatgaacaatgtggggtgatctagtgataacatgtagcataaccagtaatatgcttaaggtatcataagcatcatgcacataccaaggacgcaattgacttgcgactagcacgactaacagcggtatgaacgaatgagttaacaacaggagaaggacataccccgagaatggccctccgctggattgtgaggtagaattgcttccgttggtgttgacgttcgcaacggctccggttcccggcgcgccatctccagagacagcagcagcggcgccggcgacagatcaggctccggctccaggcgcagacatggtggatgagacaacaacgaacagagcagtcgtgcgggaagcactccccaaaaccctaatcacccgcctacccggtgcagatctcaggcgaaggtgtggttccggaggccctgctccttctgcgcgcaagcgatcagaagcgaggaagcgaaacagcacaggcgcgcgcggaggaggaagaacaccagggagaggaaagcaagcgaatcgttctgatcggactagcagccttgttagatagcaggagagattccgccagttgctgcacacgtgtcgtgggatcgtgggatcgtgcacgcgccgttacggaggcagtcgtgggaacgtgggatcgtggttgcaaaagaatagagacgtgacatgacggcacgcacgcccgccagccacgcctcgcacacgcccacgcccacgccctcggcccatcagaagcgaggaagcgaaacagcacaggcgtgcgcggaggaggaagaacaccagggagaggaaagcaagcgaatcgttctgatcggactagcggcctccttagatagcacacgcgtcgtgggatcatgcacgcgccgttacggagggctcccagcgcgccatctccagagacagcactccccaaaaacctcatcacccgcctacccggtgcagatctcaggcgaaggtgtgattagcgatcagaagcgacgaagcgaaacagcataggcgcgcacggaggaggaagaacactggggagaggaaagcaagcgaatcattctgatcggactagcagcctctgatcgacgtcgtaggatcgtgcacgcgccgttacggaggcagtcgtgggaacgtgggatcgtggttgcaaaagaatagagacgtgacggcacgccagcccatgcccacggcctcagcccggcgcgcgcgcgcgtggctttctgactcccacctcaaccggtcaacagggagcctccaataactccctatttaggttgagatactcctcgcttaattcctgagatggtattattatccttaacacctattatgggcctttgagatttaatagaataaatcggcctagcccaattattcgaacagaatatagggtcactgataatatgttattcgaaataaatagtgcaatgatggagtatgaaactgtgtcagtaaaaggaaatgaacctgctgcgaggactgctctgacggattctgaaacgaacggaggtggcgtgggtgccgccgtggggatccgttcaggcaatcgatcaatggcggcgggataatcgggcgcagcaggtacccaatgagcgagagttccccaaggcagccccgacggcgaaggggaggatcagcggaatcagtcacactggatccagtaccggcattcagcgacggtcaagctaggcatggagttgcagttgcagcggacaaattaagcaacgaaatccagagtaaccaatcctaatttagcacaaattaaagcttcaaagtgtagagtaaatagagacaggtaaagcaatgtgcattacactaattctgttaagcaccgacagctgcagcagacaaattttgaaggggaacaactacattggtctcatcgggtaatagagcaaagagaagttaaggggacacatgcgagtgaaacccaaagtgctcaccagacatgtggacatggcgctgcgtcgaacgccgtctggtccagagaggaataaggccataaatgatgcaaagaaaagctgaaatttttttcacatatatggctatcaaaatcaattgccggaattgtctatgccatattattatctatcaacaatagtctgcaaggctggtgaaattgagctacggttggggatgaggaatggggcgtggtgggcagcggcagaaatattccattgtgaaggcaccagagaaaaaacaattggcagatgtttgttactgcatcacattgatttgtacaattctgaatcagttttttttgcacgatcataaaagggtagtcatttattcaacccgttgatatgttgatttagaaagcagtgagccagcaaataaaagggaagttcatctgtcgttgaattgctcatgacttatgataaaaatcacaatcggaagattcaaaagtaaagggataatgcaatcaaagaaaaaattacctggagatacaatggatgttattccctgagtaagcattacatcgatcacctaccgtgcaacgtgcaaatgggattaaagaacatcatgagacaatagagcatgggaactgaaaaggggaagtggcttgatattgaacctgacaatatgtcatgaggtttcgtgaagtcagtggcagctacaagtcattccaatctgaggcttggcaacatggtgaatttgtattgtgacagtaggaatggcaagatcctgtttagcaaagagagggaagtaattcttactcttctaagtgtgaatttcagaaatcaaaatggaacaatggtggaacgaagagtccacctgtctatgttgaccgtgtccatggaagatcctgaccctgttatggtgttctcctcctatttttttctatatagtagttagagaaaatacggtaatttttttttaaaaaaagtggggataccagatttattttttagatggagatcaaatggttaaaattaacgggtccaccgatttaaaggaaaatcgacggtgagattatagaatgccacatggcgacctaggaacgtttgtagaaggtcacgtggcggcttgagagcgtttataggaagtttaatagacttttagtatatacctaggaaggtagcccgcgcatatgcgcgggaattttatcttatttaacaatgttagaaatttgattaggaatgtttatgattactctaatgtaaacatctttattttttcaataatttgtgtgatgtttctttgattgctagtaaccatcgcctgcgtataaattctaaactaaaattacttaaaaccgtgcagttttggttttataagaaaaaatatatatgcaactatatatcatttatacataatgtttttcttttttttaatatttagcatatcttatttttgcactttctaaactctgagtaaaaaattttctttcgtataatatatatgtctttatgaattttaggatatattaattgaagatatttttctattaaaaatatggttaatacgactacatctaattaaatgagctgaatatgttgaaatattgatttaattgtaagtatatagtattgtagtatgaaactacggtttagcggtaaatgtctttcttaatcagaaaatatattagaaaatgagacttttattgctcccaagttgtagtttagggttgtatacttcgaactgaaattatgttagattttgtttccatcataatgccaaaaaagtcaaattttctattatattttatttaaaattttagttattttcattatatcagtactccaaaaatatttgaacattgctatttagaatgggtttcaaattaaaatatttcaacattactatttgagcattctatcaaccatcccttaaatgctttgatctctgcaatttgacatgaaaatataattgggttaaggccatacaacttggcatgggataaagacaacccttaaatgttttcaatatattgtgtatgacaaatagatcctagacgcggtacacgttatgacatgaaaaaataatataattaaaagatttttctctaatctattagtgacatcagatatcatatatgtaatttagatgttatgatcatcttaggaatgtttatttatctctaaaaagatcatttattcataaaagtgcaactaagatcaagtataagtaaatagcccctatatgcatgttaagagaaattaactacttccactgttaaggaaaaatgtatcaatatttataacaccaaattatttttattgaattcaaaattgaatatgtttttataatatgtttgttttgtgtggaaaatgttactgtgtttttttataaactaattcaagtaatttgatgttgacaaaatttaagaattacttgtaatctgaaacagaaggagttggaagaaggtcactagatgtctagcatggtataaataatgggctgaccgtttattgaaaacataaggtgggatattttaatttttaatgataaattttagtattttattttatttattggaggcttaaaggtggatagatgtggtccacaatgtaagtcaatacgcatattaaattattgatttaattgaaaattacaatagtttagaaatatcataaattgaatatacgatttacaattttatgaatattttaaagtctaatttatgttgtttatgtaatttgtgggagtttttttttctcgtaaagataattttggatttagttactatggagataaaaggaacagagaagaaatggtagggagagaggaacggtagaaacgggagggagggagttttgggattttcttttaaagatagatctaaccatataagactagtaatatgcacgtgttaaacgctacagtgcaattcaatttgccacacaaggcacatgttgatcgcagcccattgagaacatagcataagggcgtgaatataaacccaaaaataacaaagtaatgcataagggcgtgaacataacaatttgatatgatacaaatatcaaagtaatagtttcataatgtgtataacaattgttggtcatctcgttaacttcttcttcttcataatgtgtataacaattgttggtcatctcgttaacgtcttcttcaatatctacatggaatgactactaaaatttaccgatggcaaaagtacatatttaaacacgagtgttaacatatagtatgaaacagagcagaccatgagattgatatggcagaaggattaaagagaactatatgctcaagtggaacttaagtgtgcatgttgtgctgctgaatatgaatttgtccagagcctagtgaaaagaaaatcatagtatttatgtaagatgacaatgttatccatgcccattcagacatcaacaagcaacataaatttttacagagcactaaatgattttatttacacactgtcagtcatgccatgtaaaagctaacaagagggtaagatcacccaaatccacatcacatacttcctaggatcaaacacatcgcatacaattttttccctgatgtttatgtagtcatcaggaatgaggccaatccaatttggagaaagttctgtgcgactgatctagttgcagtacctataccaattttgttcaccaatgtaactggaaagaaattggtacagctagtgatccctcaaatagcttcacttgtgtctgatatgagccaacagtacgagtaaggatataaaacagttattactaaaacgtgatggctgaatataaaaagcaatggcatataaataataaatttaagtatacgctccagggcatataaataataaacttaagtttgcactccacgcatataaatgattgaaagtttaacagtatactgaaaattatattagatttgagtaagagctgctagcacggttgctatcctagctaaatgtacaaagaacaaaactccatgcatgtgtttagcttactgatcgcatagctgttttgagaaagtcagcaatttgcctcaacattgaaactgtcacagctaatagttcacatgggaaataaatctattttcacattaaataaattaaaaacctctcacattcaatgattaaggggaatcactaagtgcatttatcaggaacatccattgaaaaagactattagcaggaagctgtaacctactaatttatgacatgtacaagacacaatgcagattggaccccttaagttgtacaccttgcaataaaaacccaatatagtaaaggaatcaagggtgggaaggggcattattttcagcataggttgcaacaacacattgaccagaagagattaatgtcaagcatgtaaatttagccggtattaaaatattttgcttctccatgttaagtatggtggtttggtgagaatttcagttgataattttctgagcaagtaacccagtcattcatcttggaacaacccaggttccaccatatggatacaaacttcattcaattggttatgtaacataaaattttctgaagtaatcgatctgataatacattctgaattcagtcagaagatatgaacaagagtacaagagtaggtaataatacgaatagagacatacctgatttgagcaattcattctgcacgaagggtgccatgaagaaattaaacacctaatctgcagctctgaacagaaaagatctttaattaaattaaacgtggggttctgcaatttcttaccggcggtggagaccagacgatcggggaggtggcggtgcagaggttgcccgccggggttgccggcgcagagtggagcccaattagctaataagattcaagacactcaatcaaatcactcaagtacttgaattgagttctatgctggcatttaagtgctcagagcaccaatgctatggagctcctaaataaaaaagcacaacattttcatgtgaaaaggcatataaatatgctagaacagtattaccatttatactaattatgctagtccagatcaaatcagtacagtgtcattatttgcaaagatcaaagcacccgtccagtcagtagagggttagtatatatatgtaaagtctacatagaagaatagaaaagtattaataagaattcagtggttgcaaatattttgaattcttgaatcatatagacaaatatcggtaacgagacactcttatttgagtctaataattgtgcctcatattttctcagatgattatcagtttgcagatccaacttgttgaaaaggcttagcagctttgacaaaggttaatgtagaccaattactgggaaagggtcttcagtcttatgcacaattaccgagcaaatcgacaaagttacgagaaatgtgaaaaaaataaacttcttatgagctgtattttatagctcaacagtagtacagtacttctgtgtaagattgactggataagggctgcaatataaggtcaaattttacatcaattaagcatttcacccagatcaagaccagtcctataaatctcaaataataacaagaaacaaccaaatgctggaaaaaatggaaaaatatttgacccataaatctgaaacaatgctggcccagttttagagggctatcggtatttccaatacaaagtccagctatgttggctttacagggaacaagtccgaacgtaaattatgcagttaacccacaataataaacatacaagtgtaatactatggtttccccaaaaagtgccctgtaaaatgccatggaacatatattcatcatttgggaaagcgaaaataaacagatagttgatatgtatgactgatagcatatgttcatataaacaccgatagcaccttgtacatattaacaatagcagaaacaataggtcaaactgtctttaccttcactgcatgggaccaacgaaaatggatttccagattgaaactacaaagcggtctttttgtttgaagctatgggaccaaaagtccagtgtcctcgatgcaactgtctgatgaactgacaataatcagataatgcagttacatatgaaactacaaattaagagctcacctcgtcgattggcactgtctatcagtctatggcacaagtactgctccagttaactccttcctagctatcctgcacctcggtagcgaactgcaggcctatctgcatgatcattcttgttgaagtgcagtgatgctattagtataactttatactgagattttggagtccttccatcaaccgattaaaaattgcaatatacaagtagaaaatcatgtttatttacctttagaacaacggtcatgagccactgatttaaattttctgaacctctcttccaatcttccaattattttttctattttgtcttctctctgtttttaactttttttttctcttttcatcccttatttttttttatgctccttcccctcccttaaggctggagctcgcgactcccatcctcttgcacacgctgcgtcgtcgtctcccagccacaccatacaagctgccgcatcagagctgtagctagctagctaggtggtcggcaggagcaacttgctaaggaggctatcgtcgtcgtcgtgtccgctcagcccgtgcatgtcgttgaagggaagcccagaatggggatgggcagcaggcggcgtcggggctcgtaggagagtaggtggagattgtgagctgtcatcgttttgctcagatctggcgcccctgagctcgtccgacaaccggtgcggcctggacgggaaggcggcggcggcggcttggagggcgagtcggcgacggggatcggtggcggcgaggagcagatcggcgcggtgttgacggtcgttatcgatcaatttcgaccgtaaatattaccaaaatagaggagaactagtgatgcttgcaatgcataaatatgttagaataataatattccactagtattaggtatactaacctcttgcagggaatgacactaaagtggaggagaatcgacatcaacacaaacaataaatcaatcagacgatgtcgagaaccagacttatgtatgaatggggcaagaacacagaaataacacgacacattgggccaaaattcacaagtctgcggagaagaacaatggagaaggccgccaaccgaaattgggctggattgggccggccccaggttcgactgaacctggtggttcggccgaacctccctcgcctccgttggcatttctggcaccattgctggggaagattcataatagagattacttgaactaatactttatatttatctctgtataatcatttactttataggctaacattggttgttttcacttttgttgtggaacacagggcagtgcatgactggtttcaacctgccagaaaacttcaaagaaattccagaagctttcttccggagcgtcaggacgcgagtcgttgctccgcagaaaactctaccgacagagaaaccagtcgtaccagcgccaccgaccttcaagactatggccagcaagactcttcgcgagttcgctgctccctctgctgacaatgtggccattgggcagcaggtcaacataggggacgtggatttcgacttgaagtccagccttatcacgatggcgcaggctagaccgttctgtggcaagcctaatgaggatgccaatgctcatctgcaacagttcctggagatttgtagcacgtataccatcaagggcgtcagtcccgatgccgtcaggctgcagctgtttccgttctccctcctcgggagagcaaagcagtggttctatgccaaccgtgcttctatcaacacctgggacaaatgctccacggcattcctctcgaaattcttcccgatgggcaaaaccaatgcccttcgtggaaggatttccagtttccaacagacaagggatgagtctattccggaagcatgggagcgtctgcaggaatatgtggccgcctgtcctcatcatgggatggacgactagctgatcctagagaatttttacaattgtctcaccccaatgtcccgtgatcacctggacgcggtagctggaggagctttcttctctaaaacggttcaaggagccgttgaactcatagagaagatggtctccaatatgggttggagcgaagaacgactccaaacctgttagtgaggcatgcacaccgtcaaggagacggaactgcttgctgccaagctggacctcctcatgaaacgtttggacgaccaagagaaaaggccacaaggcaccgtcaaggccttggactcacacgtcacgtgtgaggtctacggtggcacgggtcattctgggaatgactgcccagaaacccgtgaggaggcgatgtacatgggcaacaacaacgggtatcgtccacaaggaggtcaagggaggaaccaaccacgcccatattatcaaggaggtaacaataacggtaacttctccaaccagccctcctagaaggatcttgtttttgcgcaagctaaaactactgattcgctaagcaaaaagcttgctgccaataataaggtcctggaaaacataaatgtcaaattatatggctttgcttccgcatttcaaaatcagctgagctttaataaaatgatagaaacccaattagctcagttggcatctttagtccttgcaaatgaaactgggaggattccggggcaacctgactcctccattgaaaatgttaaggcaatcacgacgaggggaggtaagtccaatcatgatccgccgtatcctaaccctacaggaactgataggatgtcaaaagaagcgtcatctagtgactcggctgacaaagaggttcagccagagaagacagtgccgcatgagtattgcgacacacggttgctgccattccctcagcggagtagaaaaccgtcagtggacgagcagttcgctcgttttgttgaagtaatccagaagatccacatcaacatgccattgttggacgctatgcaagtgccgacatacgcccgttgtctcaaggacatactcaacaaacaagagaccgctcccaacaacggaggtggtcaagctgacggaacaatgcagcgacctgatactccacaagctcgcggagaagaagaaagatccggggtgtcctacgatcacctgctcgatcggggcacaacaattcgaccaggccttgtgcgaccttggagccaatgtcagcatcatgccaaaagacgtttccaacaaacttaacttcacggtgttgtcactaacaccgatatgcctccaactggctgactcgtcagtctgttacctggcagggatagcggaggatgtgccagtcaagatacgggatttcttcattccggttgactttgtggtgctggacatgcacacagggaaggagacgctgctcatcctggggcatccgttccttagcaccgtaggagccaacattgacgtgggaacggggagtatccgtttccatatcaacgggaaggaggaaaggtttgagtttcaaccgaggacggaacaatgctccatggttagaatcaagtatgggccaaacccgcagaatattcaagtggtcgaagtggagccacccaaaacgaatagcctggcggaattcatgtagaatttccaggagaaggaaacaacgatgccaggaaccgttattgaaggacaccggtaaaatcacctgtaccggccaagaagttagagcagccggctcaaaagaagccgtcttccgcaccgaaatcaaagaaggtgtggaaggaaaagccaaagacgcccgctccatcacctccggagacgggtggaaaatccgcgcactgaaccgaaagaaggtacggtcctacacgtcggacctaaaacgacgcgatcttcgccaacaggtaaattggtatgtatccgcatatttgctttcaacaatttgaatttttgcacaatcacatgtttaaatttcaaaattgcatttaggattttgaattttgaggaaattcttcaactgaatttttcagagcaaaccaaaataaaattttcagcgaaaattcactttgccatgaccacactgaccgttcgaatccaatggctgaaagtggggccggctgggcccaccaggggttcggccgaacaccctggttcggcggaaccggccaggcaatggctccctgccactttttgcaaggtaacggctagtgggtcccacatgtcatttctaaccgttgtgggcaccctaaaaaagccagccggctgggagagggaattccatcccatttcaacacattttcattccctctccaaagtttgctctcaagttcattcaagctttgatagtttccctcaaattcaaatttttagttgcatatatacaagttgctttagtgaaactaaccggcgggtgaaactcttgtcattcctaacccccgccgagttagtccgttcttgcttcattatgcagaatgaggaggcgattgtctcgtctgttcaaggggtccggctcttcatcaagtcatcatgacaggtccagtactcgttcatcagctgatgtctcgatggaagacggcgaagctccgcgacgactcctgaacgacaccgacctcgaccttgtcagtgatcgggagagacaagcctactacatgctgagcgaccgggagtatgctcacacgcgagaatactcaccggagttgctgaaaaagataggtatggatgtttaatttcgttatatttggaaatctattggttggcagagatttgctgtggtagatgagcctggttctcgtttgctttgcaatttctgtgcactttgaaagaaatagaagatggtatttcttttcgctttttccatgaggagttcacgctcacatggaagggcttaagtacacttcttagctttctcgattcctgtaagatcgatatccagaaaggaatttcagggttcgagaaaaataggttttgggaagatatttctagtgctccaatttgcaagaaacctagaacggatgatatccataatcctacacttaggctcatgcacaaatggattgctatgactttgtttcctagaggtgatctgagacccattaggggagatgaattaattatcatgtttgccatggttagaaaaatcaaaattgctcctgtgaaatgtatgataaggcaatggttagaaagtataaagttctctgctcctgttgagtgcacttctctgattacttggatagcaaaagggttaggggtcgttagcaaccaaattgcttttatctcagccgctcgtccgcgtattgatgaggcttatctagtgcaagggaatattttgaaacatggggcagatggatctttgatatactttttccccggttgaacaaatgaaatcccgttgccaaatgcggggtatcatttgtacaactgccatgaactaaccattcccctgcagaccatagaagaatatcgtgcaggcagaacatacagggagacgcgcaacatgacaaggaacgaacgagaaagttcatcatcctcaacacccgtgcagatgtatgaggcaggttgggcaccaactggggatgcacccgggtggacccaagctacacgccatagcaccggagtctcgacctagacaagcgctagtgaggaccggtggcatgcgcctcatgacatccaatgggaggacaatcaaccttccagatcaagagatgtgcctccatctccaagtgaatggcgctcaagttcctctcgttgggacttgggtgaaatcactaggagaatagacacccttgatatgcaaacaggggagatccagtacaacctcacggaacacatagctcagacacaagaatggcaacaatctgctgatgcccagttcaccaacatcaacaacatgatgcagcaacagcatgatgaccttcaagcgtactttcgctttcaggggttcaatccttatcaaggaccctgagcgaaacctaagcttgggggggagacatcgctcccccagctgaggtaacttgtatcccattgcatatttccctttccaattgcatatttgcttcccaattgcatattataaaacttgaaaacaacataaaaatctgcaaaatagaaaataccaaaagattggataggtttgagtcatgctaggtaagacaagctagttctctttgttgaaatgatgaatagttgctctgttttatatctctgatatatgggttcttggtaagttgttggtatttcttaacgacattactagaaatataattcccagcaatggcgcagaaatacttctggtatattatggttacagagttcatccacaagcgcacggatataccattgtagcatttcacccgtgagtattccaagggtatcgtatttattttatcccgtgggaagatcatgtagagagaactcaactaataatttatatattacttatgataatcatattctaaacaggggttaagataatccaagggtagagtgacacacaagcatttctactcatcctcataataatttatctaagctaggtggaaagaaaagagaaaggaaatctattcctatacttctaatatacatagtatacatacattctagttaactgatatactagctaataccctctatccgatgccctcctggtacttcgagaagtcacctctgactgttgttgatagaaaacacgaggcctgggagatctgcttaactccagtgcaggtccaaaactcgccttcagatgtatgagcgtgccagttgatttgatcctacaatcaacaagaaacgaagacaaagaaaccgcgattaaatccataaatgatagctgatcggctaggtgtcgatgacatatcatttattttaggccgatgtcatgcgtacatcgatcggcagtcatgaataattaaagaacaagtaaatctactcgaccggctgtagatattaacaatatataacccttatgacgatatatacttaaatcaagtgattgggatagatcggtcgccatgccgagactgtataaatcacttagatcgaaatataaattaacaatagaactatatacgttcatatcatagccgatcagatagatctagcatgtatcggctaatactccgatatcactccatattaagatattaaagcaagtagaatatatcaaacagaaccataatatacttagatgcaacaagatcttaacataaagggcagatttaacatgtcaatcaagcacataggataactatagttaaatcaggtaagatcggctgaaaccccgatgctaccctaatcggcaaccagaaggcaggctagagattgatattctaagcatgacttaatatatcaaactcaaccgatgcagcattaagtatgaaaagaagaacaatatctagacaatcaagccggtggatgtttcatagagtggtagatatcttatataatccaagctaacgtcgctatctaacctaatcggctgccttctactgacggatgttagccgatggtaggttagatgacgatattaccgaagattatacaagatatatgataacttgacgaattacataaacaagactagagtgtcataaaaatggaagcactaatcccgaaaacactagtcgccataacaagttttacctcttgttgaagatcgaaaccgatgcagctcaacccgaaagcaagaactcgttgaaataaaactaaagcgaaaaagggtggcgatgcgccgaaattgtattgaacgtgtgtgttcaaaaattacatagggctcagggtctatttatacccgagaattacaagatatgtccatagtggacacgacttcttatctctaacaaactctaagataccataagcctttgcggcagacttttgcccaaacatatctctaaggaaattacataaaatatcataattaatagatacaattgccttctcaggactctatccatgcgtggcaatcatcttgaagcatatcaactcaacccgacgatgtacaccgagtcgtattcttggaatcggctgtatcggctagccctgtctgactcgaactctgccgatcctgaccgaagccgatccagactctagccgattcctgctctgttcctaaatcgatctccgcctccgattccactttgatctaatcttcttttccgatgccgatattaccaaatttggttgtcaacacatgccccccaagtccggaatatttggtaatgtttcggatttgccatatatcgagtccgagtgaatatcgcacttgccgttttctgaccgttactccagccctttaaatactaaccgtcacccccgagaaacttcacattgtttcctccgtttttaccgctgaagccaaactttatcctctctctctccggcgattcctccaacgcataaggcgatccccaggcgacttcatctccggccagacttccgcccgcggcgatgtcgtcctccgccatcccgtctgctgcaccaccagccgagtatgctgaggtaagtctctatcggctagatctctttcttttaccacagattggttttctcttgcctcatagcattttcttctcctctattctcgattatttgtagcattcatccaatctggtagcaattccaagcttatcacatgaaaatcactacttccttggtccagtcggcagtcttgatcctactgagttcatcaacggcgaaactaataggattcctttcagattggccaacccagatctaggtcactggaagaatacctttaaatcttggccatctttagagaaaacctcacccgagaaaagctggatcacatggttcaaacgcatatcggctagcaaaagagtccattgggatgtgattggaatcggccaagcactcgaccttaccatagccaactcaactaaggacgaaccgctaatggcagctgcctcttatttctgttccaatactatcaacgccttcttgttcaggctaatcctatgagcctaaacacgaaaaaccaatatgacttcaagactaagagcataggcggttggtcaggctatgtagcaacatacatgggccagggtccagtcacccctcgagaacatttggctttcttgctaatgtggctagaaaaattcctcttctgtgggtcaagctgtggccctacaaccaattggcattttgtagccgaagccttggaaacaaagagacaattccctttagccaaaatcctccttggctacttctactaaatgctaaataacgcatgggctaagttagccgtcggctcaatagtcggagctggtggaacatggtggctactgcaatcctggctgaatttggtagtcatgaagtttgtcaatcggccatctgtaacacaagctgaattcccaagactggagccaattgaagacagtgacggagaagaacgcactcatcggagatgcacatccttcggagaatatgcatccacaccaactgatgcaggagcaaagctatcagccgaaatgctcaaagattggttttgcagcttctatgaaggattccaaaaagaagctcgagtctggttcctctatgaagattcaacacttctagaacatcctttggactttagattcgaagatatcaaccatgacagatattagaaacccagagaaatcttctcaactgcaatcagcccatgtatccttactgtcagcattcatcaaggaagaaacatccaagtctcctatgaattttatcatccaatgagctctgctaggcagtttggaatgggccaacttccaatcggcttattctttgccgataagatccaatgcgagggtaaatctcatctaccttaatgatgaatcggctgcttaatcttcaaggacccccattgggcagtattgaaaatatagagttggcaagattcaggagtagaaacttcgatagatggtggggtgaatggaagctgcatctattccatcaaccggcttcaatgtacatgacagacctatttccagatgttgtccctcagatatgtctttattttattaatcgtatttgaacaattatcagccgattcatcacctgattaatctaatctcctattttatagacaacagaatcttcccccccacaccagagcaatagtggcaaagatatcgaatatgccccaggactaattccaaatggaggtggaccatctcctccattcatcggctatgatgcccccaaaattgcggctcttctctaaggcttaatcagggaaccatccgatgcaggcaagaaaaggaaaaccagatcatcagctgtggacacatcaggtccggctctcaagaagaaaaccaagtcaaagaaaaccaagccaactgatgatctgcctgccctagatccatctatcgaacaagcgctagacgaggaagagattgaagaggacgttgatcaagctgcagccgaagtgagcgatacagagagaacaccatcggcttcacccaagcagactcctccaactccttctgccccagctcatttttcgagagtaagcatctctctttgatttcctctgtaattacttcacctttcagctgattactcacagatgtataatcacagaagaagaaaactgccgtgaggaagaaatcggccgcaccaactctcaaaccggctccaccataagatattatcaatcctctcatcaactgatctcggccgattatgtctaacatttgtgttttttacagcctcctcctcctccttcacctcctgtgtagctagaatcaggcaaccttattccttcggcggcagacagtcataacgtcgaagaggaagaacaaccagctactcctactattccagtaagttttgttaacataaatttgagatcagctaataatgttttgatctttaaccatccataacactatctcttgcagatcttagctgatctgttctccttcgacatcaaggattatctcgatgaaacagaggaagacaccaccagtaaagcaatagctcctctgtctgatgatgtgaagagaacgcttgaatatatctctcatcggctagaggcatcactagacaacttggtgaccaactgtggctcgatccgggtaaggttcacagatatccaagctctactcccagatgaattagccgacgcccttattccagccgtctatcttgagcaacaccaattcaagctggagaaggccaggcagagattagccgatcgccgggagcgcaaagatattgaagctacaatccatcacaatcaacagcttgtgcatgtagagaaatccaaacttgatcagctatctgagggcccgatcaagtcaaatatcgatcggcttgaagctcgtaagattgacctcatggcacaacttcaagaatgcaacgccgagctagatatggagcacaaaaagttagccgatctcccgaagtctatcgaagataaaaaaaagccagactcaaatcggctatcaagaatgttgcggatctgaccaagtctctgaaagtaatccctggaaccgatgctcaagatgcccaagctattgagtaagtgtaacaaattaggcaaagggctattttggctatccaacgatacttgtctcaatgactttctgtataataaactttagaaaacttttgtaatcggctaagatactctagttactttgctgtcttgatttgctcaaaaatttccattatttgtatatataatatatgcccccctaattttccaatgtcaaaagcattcataaaattataaaaacaactaagggcgaaataacaatatcggccattgtacatcggcaaaccacaaccgattacaaaaaaaaaacaactaagggcgatataaccatatcggccattgtacatcggcaaaccacaaccgattacaaccaaaaacaactaagggcgatataaccatatcggccattgtacatcggcaaaccacaaccgattacaataaaaaacaactaagggtgatataaccatatcagccatctcaaggcgatgaaaaaaaacatcggctatcatgtattggcaacatcagctgatcatgtattaacccaaacactcgggtaatatttcttcaaatattttccatttagtgctctgccataaacttctccatcgaatccttgcaacatgtaagctcccttagataccaccttatgaatttggaacggtccttcccaatttggcgaccatttgccgaatttgctatcccgagtcccaatcagcaaaatcaacttccatacaagttcaccttctgaaaaatctttgggtactactttcttgttataatgccgggcaactcgctccttatccttggtaacctttgcaagggctcgtaaccgtgattgaaccagatcctccctctcatcggccataaggttgtaatagtcatgggctgttaaatcattttgcaattccgttcttctagagccgattctaacttcccatggcaaaacagcttcgtgtccataaacaagtttataaggaggaacctgtatcgatccatgacaagccatccgataagaccacaatgcttcggcaagccatccgataagaccacaatgcttcggctaaacaagtatgccattgctgaggataatcagaaatcttcctcttaatcaacttgatcaagctcttgttagatgcctcggcctgcccattagcttgtgcataatacggtgaagaattcaacaacttgattcccatgctatcggcaaactgaacaaactcatcagacacaaaaattgaaccttggtcagtcgtaatggtttgagggataccaaatcgatagattatatgctcttgaacaatttgtatagcatccccagaatcaactttcttcaaaggaatcgtctctacccacttggtaaaataatcggttgccaccaatataaacttatgtcctttactcgacggtggattaatcatgccgatcatatcaattccccaactactaaacggccatggtttaataataggattcatagccgatgccggcgctctctggatcgctccaaatttctgacaatcttgacaacctttataatatctgaaacaatcctccagcattgttggccataaatatccagcacatcgaagcaaccacttcattttatgagccgattgatgagtgccacatatcccttcatgaacttcaccgattgcaacttttgcctgatcggtactcaaacatttaagcaacaccccatcaatcgtccgataataaagctcatcgtccaacaatgtatacttcaacgctttatatcttaacttccgagaagccgacagagatggatcctgtaaataccgatagacatcatatctccaatcatcggctagtatggcagcaacttcaatctgaacatctttgatcagcggcttatatcctgacaccccttgggctaaatcattagcttcaatattctgctctcgagacacatgcttcagagttactagccgaaatttcttcatcagttcttggcacttctcattataaaccagcaacatatcattcttacaatcatattctcctgccaattgactgatcaccaacaaagaatcccccatgatttcaatagtatcagcttcaactttctgaagtagctgcaaccccttgagaactgcctcatactctacttgattattagttgcataaagtttaataatataggcaaactcaaagcatgccccccgaggggagattataaccaagccgataccacaaccataagtacaaactgacccatcgaagaataaagtccatggcacaatctcaaccgagccaatagaatcatcacgatggtcaacaataaaatcggctacagcttgtcctttgatcgccttcggtgactcacaccgaagatcaaactcagtcaatgaaaatatccactttccaatccttccttttcagaataggagccgataacatatacttgacaacatcggccttgcatacaacggtacattcattggacagtagataatgtcttaacctcgtacatgaaaaatacaaacacaagcataacttctccacaggagaatatctagtctctgcatccaagagccgacggctcaaatagaatagaaccctctcttttccctcgagctcttaaatcaagaccgagccgattgacttatcaccggccgataaatataaccgaaaaggtattcctttctgtggaggaatcaaaactggaggagaactcaaatattccttaatattatccaacgccttctgttgttctgccccccaagtaaattgctaatcggccttcaatctcaataatggtgtaaaagattctaaccttccagacaaattagaaataaaccttcgaacaaaatattttttgccgatcatctcctgcaattctgtcttgttctccggaggcttaatcttcttgatcgcattgatacttctctaagttatttcaatccccctctcatgaacaagaaatcccaagaactggccagccgatacaccaaaagcacactttgtcggattcatattcaagccatatttcctggtcctctcgaaaacctttctcaaatcggctatgtggtcctctatttctttagacttaacaaccacatcatcaatatagacttcaaccaaccagcaagattagatcatggtaaatgtaattcatagctcgttgataagtagctccagcactctttaagctgaaagtcatcacaacctattcaaacaagccgattgcaccaggacacctaaaagctgtcttatggacgtcttcttcggccatgaagatttgattataccccgcgtttccatccataaaacttaatatcttatgtcctcaagcagcatcaaccaactgatcggccactggcattggatattcatcctttggggtagctttattcaaatctctaaaatcaatgcacacccttaccttgccgttcttcttgataacaggaactatgctagaaacccattcggcatatcggcaaggacgaataaaaccagcatcatataaactcttaatctcagccttgacaggttcgagcatgtcggctttgcacctcctcggaggttgttgatgtgacctaacccctggtttggtaggtagccgatgttcaacaatcgatcggctgagtctaggcaaagcaatccctaaattctttcaagagctctatcagcttggttctaaattctgaagataaattcttactaataaatgtcggccttggccgatcgcctggacctatatctattccaaatcatcggccgacataaaaccctgaccttgcttgtcatagagatcatctgctgtgtccttggtgtagacatttgaaccctccacgacgccctcaaagtaatagcttgggttctccatcttcaattggctgtcggctggcacgatttctatcttgtcgccttgccattgaatcaagcattgatgcatggttgaaggaatacaacaattggcatgtatccaatcccttccaagcaacaaaatgtaagaacccttcccatcgatgacaaaaaatgtagtaggaatagtcttactgccgactgtcagctccacatctagaacacccttggtttctgatggattgccatgtttgttttgatgagatcttcggcgtttctgcctaacttcctgaacatagcatcagacatcaaatttactgcagctccaccatcgaccatcatcttagacatcggcttcccattaacatagccatttatatacaatggtttaagatgccgattctccgtaccctcaggcttttcaaagactgcttattctggcgacagaatcaatttagccgattcttcttctatttcatcaacatcggcttggtcgatcccaaattcggctggcaaggtaaaaaccatgttaaccgacgcaatcacaatgcttttctctttggccaatctctttgcttcatcagccacagcttcatcggttacagaagcttgtttcttaacgcgccattcctgcttcggctttgttttctttagccgatgattgatttcctgctcgacttcctgaaagcgttcccggcttctcaatctttgaactcttctcttctgattcttcataaatataccaggaggacaccattgagtcttcctatttcgtcatcctctgggtcatgatcttgatttaccgggcctaatctttgatcaacaggaacccttgcatgcttcagccgattgcctttaatatacaaccggcttgaaccatccgcaacgttgccgcattcaggacagtcttcgatagatggcagcctcataccttcattccaacaaaatctaaaaaactcacaactccaatgaggatcgaagccatcatcatcttcctcataatgcatctcctgttgtttatcatacctcctttggtacttattgatgatcttagccgaattcacttgaaaacctcttgcacggcccccatcggctgttcggccagctgtatgcaccatattgacaggaaaaggattgccatcaaccttcatcggcctcttggaatcatcaaacttgattttgccaccttcgatagccgcttggatctgctgcctaaagaccttgcaatcattggtagtatgagatccagaattgttccatttgcaataccttttcttgcctaattcctcagccgatggaatggtatgaccagcagggagtttaatttgcttttctcggagtaacagatcaaaaatcttgtcagccttggtaatatcaaaatcatacctctcctcttttccagaattcttcacccattggcatagtataacctttttgctcctgacccattcggctgcagctatttcagaatcgtcatcctcatcatccgatccacacatataagaatagacatgattaaccttcctagaattcctcctagcttcagcaaacctctgctcgtgcaaagttaccttttgtgtaagatacgataagctttcaaagtccttagatgagaatttctccctgatcggagcaatcataccctgaaaagccaaatcggctaactgggcattagttaaactcaagctaaagcacttattcctcatctctctgatcctttgaatatattcatgcacgggctcatcgtgtctctgcttgattgctgtcaaatcggacaacttcatctcatgtaccccactatagaaatagctatgaaactgcttctccagatcaacccagctgttaatcgatccacacggtacagccgaaaaccaagtaaaagccgatccagccaaagacaaccgaaacaacctaaccctcaaggcatctacagccaatgcttcaccacactgagctaaaaatcggctaatatgctcataagttgatgaactatcttgccctgagaactttgaaaaatctggaactttgaaccggttaggaagagggactctctcaaaccattcaggatatggttgtcggtataaatttccagtatcttttggtttaagcccgaactgttccctcatcacgtcagcaatcacatcggcccacggtcgttgttgagctgctccttgcgattgttgctgcatgggctcgaattggctgtactgaggagcaaattgagactgaattaacccctcttgctgatattggtcttgcggggaagggagttgatattgataatttaaattgccccctggtaattttggtagtttggctgaatatttcgcaccaagtgctcaggggcaatctgaggtactaccgtgtggtccggctgcacgtgatggaccaaatgctctgggacaacctgattcagagtatgtcgcacagccgatggattcatcaagccttgctggtgaatcggctggatagtctgctgtcttgacggcgtttgttgaactggctgcacaacctgttgctgaattggttgtacaacctgctggattgggggtgtttgttgaatcggctgctactggactggatcaacagcagattgaggtggcaaaaacatggcagcaacctgatcctgcgttagccgattcgcaacttgcccactatgttgtggctgctctctcatcaacagccgaggattaaccagctgacctggtgccggcgttgatggagcaggtggcgcaggtggggaaatcgataccggcgccatcggctgggttgatgatgcaatgggaggaaccgcttgaacaggtggatgaatatcggtgatcaaaggacgataatttggaaaggtacctcttggcaaataaattgggcctgcagcctgatgttcagctattgaaccagtggctatcgccttcatcatgtttgacaaggtattgactaataccccagattgattgattacagcattgtgcacagcatagtcaacccggtcttgaaaattattgaaaaattcatgtgacgcactgccatcttgattaagatttcctccctgtggtccctgagtgccatcaacttgaactccatgcactccttgagagtggtcaccctgattctcctgagccgatccatctgtagcacctttgtcgctcggttgacccaagccatctagggcttgtttcagtcccgcatccttggaagaactggtcccggggacatcagccactactcgcacctgatacttttgcaccactgtccccttgcgggtctgcatgaatgagttcaagaactggtttcgtgcttgctgcatcattgcttcaaactccttctgatcaggtgtcaatttgtccggagtaatggtcataacgttaccctcattaacgtcagattggtctaattgctggatcttctctttaacagaacctgggctagccgaggacggcgatggtggcggcttctcggccatgaggaaaacggttttctgacttctaatcggtcccaccgggcgtgccaaaagcgtgttgatagaaaacacgaggcctgggagatctgcttaactccagtgaaggtccaaaactcgccttcagatgtatgagcgtgccagttgattgatcctacaatcaacaagaaacgaagacaaagaaaccgcgattaaatccataaatgatagccgatcggctaggtgccgatgacatatcatttattttaggccgatgtcatgcgtacatcgatcggcagtcatgaataattaaagaagaaataaatctactcgatcggctgtagatattaacaatatataacccttatgtcgatatatacttaaatcaagtgattgggatagatcggtcgccatgccgagatagtataaatcacttagatcgaaatacaaattaacaatagaactaaatacgttcatagcatagccgatgctataggataactatagttaaatcaggtaagatcagctgaaaccccgatgctaccctaatcggcaaccagaaggcaggctagagattgatattctaagcacgacttaatagatcaaactcaacagatgcagcattaagtatgaaaagaagaacaatatctagacaatcaagccgctagatgtttcatagagtggtagatatcttatataatccaaactaacgtcgctatctaacctaatcggctgccttctactaacagatgttagccgatggtaggttagatgacgatattaccgaagattatacaagatatatgataacttgacgaattacataaacaagattagagtgtcataaagatggaagcactaatcccgaaaacacaagtcgccataacaagttttacctcttgttgaagatcgaaaccgatgcagctcaacccgaaagcaagaactcgtcgaaataaaactaaagcgaaaaagggtggcgatgcgccgaaattgtattaaacgtgtgtgttcaaaaaatacatagggctcagggtctatttatacccgagaattacaagatatgtccatagtggacacgacttcttatctctaacaaactctaagataccataagcctttgcggcagacttttgcccaaacatatctctaaggaaattacataaaatatcctaattaatagatacgattgccttctaaggactctatccatgcgtggcaatcatcttgaagcatatcaactcaacccgatgatgtacaccgagtcgtattcttggaatcggctgtatcagctagccctgtctgactcgaactctgccgatcctgactgtagccgatccggactctagccgattcctgctctgttcctaaatcgatctccgtctccgattccactttgatctaatcttcttttccgatgccgatattaccaaatttggttgtcaacaactgccgagttccttacgacagtccgtcatgaccatccgaccggggctaaatatggaggaataccctccccaggaaattaacttaggattatatataggcgcggaggaatacccgtactgagctgtcaccttcagcggcccacctctcatccgcaatatataacccaaataatgatatctcgtaatctagacaccatgtctaaactaccaaatactactctaatatcatcgtcatgacatagagtaattgcataagtaaacactatacccgcaccaaagcatctcctagataagctagccgtacattcagtataacaagaacataatgtaaagtaggtactcatatactcgaaaagtatttcaataccataaatgtatatagaagagtattctaataaaaatacaaagcttagaaaagaggaaaggaaagctgtagagccatacctgaactcttccgaagacttccggactcctgattcctattctaattctattccaccagctagatactactaaactaaacttgagagagatgagagagctcttgcttgaggtgtgtgaatgaagtgagaaggtgaagtccttttataggcaggtatgacggttgtaactgctgcgaaatgtctgaagtaccccgcaaccgccatcaggagaggatctggagcgtccctgccaaaccccacatccaacggtggagatggaggttcggccgaacctcctggttcagccgaaccaggggccggcccaacctggcccaaaatcggcaggtggcctcctctgttattctcctccatagacttgtgaattttggcccattttgtcgtgttaattctgagttcttggcccattcataaatatgtctggttctcgacatcgtctgattgatttatcgtttgagttgatgtcgattctcctccactttattgtcattctctgcaaaaagttagtatacctaatactagtggaatattattattctaacttatttatgcattgcaagcatcactagttctcctctattttagtaatattgacggtcgaaactgatcgataacgaccgtcaacataagtgctctctcaaaggttaaatataagtagccaacaattatccgggaacctgaggtaaatgggttgcacttgctgatctaagtctaagttgttgcgagatatgagatagtaaatatgagttgctatgatccagatactagtttgacttgaattctggatgttttgtttttcaaaatgataaaattgaaagttcctcatttgatatatattcctaccaaagccaaaaatatgctatcatgattaaaccatatacattttggttgcttgacattccattgaactttgtcaaactcttgtgacttgtgtagatacttctcatgctctctgatcaagatcatacacccacatatatgcacatgctaaactcctacactgggagctaagcaatattccattccatttccatattaccaccaaaataaattatccatgctttcatgtgctttctcctcctaaaaagaaaaatccttttgaaaaaaaaaagagagaaaaggagggaaaggcatggttatgaaaaaaataataataataaagttatgctccatcaagcatgagcatgattgaaaaaaaaatgtagccatgccctctcctaaccgataaaacaaggatttttgggagaagaaagtaagcacaaagaagaagtatttttttttatttttcctcatataccatttccaccatatatcacacacattatgcacgatcttgatcttgagtatatttagttatctgctctagtctaagtttttgacttagtaataaatgtgaatgcaagtatgccatgtttgatccctaccgatctccacatacaaaccttagagtaggaatcaacaaggcaacatttggtgaggaaattcatactgatacacttagagagactgagtgaatcatttgaggaacttggctttcttttgcaaaaatcatttgaagacttccggaataagaggtgaataaagattgggtgattggtactctaattgatgttctgtccttcaaccgcccaaggcaaggagaagcagtgtctcgtgggaatcaggggtaagggtaagccaccgtgccaaagattatttaatctgagtgagggtatatataccttgcacctgtatctctgagatatgcagcatagtagcaactcctgatcaatcaatcaagtctttgttccctttcgtccttctctcgggacgagtaagggttcaagcttggggggttttgttgacagtcgttatcgatcagtttcgaccgtcaatattaccaaaatagaggagaactagtgatgcttgcaatgcataaatatgttagaataataatattccactagtattaggtataataacctcttgcagggaatgacactaaagtggaggagaatcgacatcaacacaaacgataaatcaatcagacgatgtcgagaaccaaacttatgtatgaatgggccaagaactcagaaataacatgacacattgggccaaaattcacaagtctacggagaagaacaatggagaaggccgccagccgaaattgggctggattgggccgtccccaggttcggccgaacctccctcgcctccgttggatccaggttttggctggacggttgagatgaagccccaatgacggttggagggtattaccgaccattccaaccgtcacaaccgtcgtagttcagctataaaaggacttcaccttctcacttcacttacacacagcaatagctctctcatttctctcaagtttagtttagtagtatctagctggtggaatagaaatagaataggaaccaagagtccggaagccttcgaaagagttcgggtatggctctagcagctttcctttcctcttttgtaagctttgtacttttattagaatactcttctttatacatttatggtattgaaatactttccgagtatataagtacctaccttacattatgttcttgttatactgaatatacggctagcttatttgggagatgctttagtgcgggtataatgtttgcttatgcaattactctatgtcatgacgatgatattagagtagtatctggtagtttatacgtggtgtctagattacgggatatcattatttggggttatatattgcggatgagaggtgggccgctgatggtgacagctcagtacaggtattcctccacgcctatatataatcctaagttaatttcctggggagggtattcctccatatttagccccggttgtatggtcatgacgggctgtcataaggaactcggcagtcaggggtgtcttctcgaagtaccaggagggcatcggatagaggtattagctagtatatcagttaactagaatgtatgtatactatctatactagaagtataggaatagattttcttactcttttctttccacctagcttagatcatttattatgagaatgagttgttaatgcttgggtgtcactctacccttgaattatcttaacccctgcttagaatatgattaaagtaatatataaattattagttgagttctctctacatgatcttcccactgaataaaataaatacgatacccttagaatactcttgggtgaaatgctacaatggtatatccgtgcgcttgcggatgatctctgtaaccataatataccagaagtatttctggcgccattgctaggaattatatttctagtaatgtcattaagaaataccaacacgcggcgaggagcagctcggtgcggaaggcgtcggcagcgacatggcagcagggatcagtggcggcgaggagcagcttggcgtggaaggcatcggcagcgacctgacgacaaaagggcttccggcggggggatcggtggagggcgagccttcagcggggatcggtggcggtgaggaacagatcggcgcggagggcatcggcggcgacgtgattcctgggcgaggacggatgcgatgatgacggagtgggcggcatcgcggcgatggagactgcggcgagccggcgcccttgatgacgtgcggggcaaatcagcgaggcttttgggggaggggagcgctgatggcagagcagtttctgtgtcatcacgtgcgggagagggatcggggatgcggcgcaggtgcgaatgggaatgcggcgggtgcagtggaacagcgagagagggggcatgcggcgattgagggaggtgggaggtgggatcaatctccaacgttaggatttcaccgaaggcgcggtgtttgccaggggaggcggaagccgttggatcgatgttatttgatgattttcgatcgttggatgtgtcacatgatgagttgaactatggatcatcgatgtaagtggaaaccgatggttagatgttttattttcatttgtcacacttatatattattttaatttattagagtgttacgtggcgatcaacttagaagtgtttatgggtgtaccattaagcccagagatttgcagttagaacggctgcacgatctaatttttagataacaaaatatgagcaatatgcattttgaaatctatatttaattataaataacacaacaattgaaaacacctgagaataaaattgaacttgagagtcatgatcatttttagatgtccgaattatttttaaatatattgagtgttaatgataaaataggatatgttagctactccctctgtcccataatataaacaattttaactttttttcttgcactgtttgaccacttatcttatttaaaaaaatttgtgaaaatataaaaaacgaaaagttgaacttaaagaatttgaataataaagtaagttacaaataaaataaataacaattccagaattttttgaataagacgaatggtcaaacagtacaagaaaaagtcaaaaccccttatattatgggatggagggagtagaaaataggagaagatgggagtttcggagggtggaagggatacgtactgcgtttttttttacctcatatacgtaaggtgttggtggtagggataccggatttattttctttgagatagagatctattggttaaaattaacggatccaccatttgacaatgtgattatagggtgccacgcgatgatataggagcgtttgtaggaggccatatgacggcttgatagtgtttataggaagtttatttggctttcagtatataagtctattaaacttcctaccaatgctattaagccgccacgtgacactcatatataacgctcgtagatcaccacatgtcacatctccaaattaaaataaatattaaaaattatgagaaataaaaaaatatctagctgtcgattttcacttaaatccgtaatatgtgattttatatatctattaacacttcctcctaaactcccctacgtacgatgtgcgtagtagtagtactgtttgtttgcagaaggtgtaaagaaaaagtactgtttgccaaaaaaaaaagacgaaaaaaataatactaacgtagtaacgtatgtacaccgccgaaaaaaaatagaacgtacttaccctgcccgatcctgaccctgatatggtgttctcctctttttttttttttttggtaattgtgtttttaaccctattttaaactctgactaccaatttaatcctaccttaagtttgcttttttaccctcttttttaaaaaggaatgttaggtctggctctattccgttaaagcaacataacggtgttacggtgttaattctgagaaaaatggcttttatgcctcccaactcatttgactactttttcaaagtttttgcttgtctaattttgtgtatttttatctaaaaaagtgacaattcttttactaagataagtgacaaatttaacttaggttcgagggatttgacaagtttgaaattgatttaacttttttttgacaaaattcacttagatttgatatatttttgacaaactttaacatacatttgacagatttttgataaatttcacacaaaagaaattacataatccctccagcaccaacagcatgcagtcctcctgagcaggagcggctccgtctccctccagccgggcaagaacaaagagaggcgagagagaggcgagagagagatggagagcagctgagcagcagcaacagaaaaaacaaagcagcagccaaacacttcctggcgagctcccgcaccatcctcgacccgcgccgcgcgcctccttccgcgccccgcggcggcggcgtgcgcctcccttggcacccctcggcggtgagctcctgcgccttcctccttcctcacggagcagctgctgctggacacagattcagtgacattcccccgtgatattctcggtgacattgtgtcactgtgggtgtgcctgcagtgacacaatgtcaccgagaatatcacgggggaatgtcactgaatcctaatccgctggtgccgccgccctctgtgcaccggtgctgagagagatggggttgagagtgactggataggattgggagtgaatggatagggttggttgagtcctcaagggtattttgatcaatttaaataataatttgattttttttttcttttcctaaataaaaataatagaaatagggtcagacggcaactttattttggaaaaacagggtcaaatgagcgaactacgaaaaatagggttagattgatagttacactctgaaatagggtcaaatgagcaattgtctcttttttatatatattagttagagaaaatatggcaattttttttaaaaaaaaaaagtggggataccagatttattttttagatgaagatctaatggttaaaattaacgggtccactgatttaaaggaaaatcgacgatgagattatagaataccacatggtgacctaggagcgtttgtaaaaggtcacgtggcggctaccctgcccgatcctgacccagttatggtgttctcctcctttttttttctatatattagttagagaaaatacgacaattttttttaaaaaaagtggggataccagatttatatttattttttagatggacgtgccgacgcagaacgtgttcgacaacgcctactaccccaaagcaaggtcattaaatgggaatacatgttttatcatgtgctacactaagttgtgatttgtgaaacatgtgcacaaatctctacaaacaataacaaagtttatgcttctctgctgccatgaaaatattgtgattatattattctactatttaccattgatgaacacaagttctacgtatttacaatcatacttctctttctcccacattttatttttttttcaaaccaagggaggctcccacgatatatattaatttctgaagtttatataaaaataatggcaaacgccaaaaaaggggaaaaattggaggagctgaaaatgaaaattacagtagatcaatccttgagactaaagggctatgtatctccttgagccgaagtaaatgtaggcttaaatcggacttatgatttcttttctaagaaggaatagaaggctaaataccctgaagaattagaccattcctttccttccaaatattctaagcagctaagagaaaaagttacataaagcatggatgggagaatgaagcatgctgtgattatatcattaggtatttaggtgagggacatttgcttatttgatcctgtttcgaagcctaacaatcaattcgaccctactttttttagttttcttatttgaccatgtttttcaaacatgaacaatccatctaaccctatttctactgcaccgttaaagtttcatttggaaaaaaacaagaaataaaattactttttgtaatgaccaaactgccctcaaagaaaccctatccactcatatctctctttcacgtattccatcacacactctctctctctctcggcgagcagtggcggcacgcacggaggggatcagcggaagcacgggcttgtggaggaagggaacggcggcggcaaggcgtgaagggaagggatccacgccagtgccggctcgcggagggagggagcggcggtgacggggcgcgggaggcatctgcgacggtgccggctagcaggggagggagtggcggtgcctccgcgaggagggagggagcggtggcgcgcagggagggagtggtggcggtagggctcagcagtggagggatctggcatgggaggggtgaacgaaggcttggaggcgacaaggagtggcagcggtgctcgggctgtggcaggcggatctaccggcgtcctctcgccctctcgccggtgccgtcacgccctctcgccgctcgccggcaccaccttggcctctctccgcccacacgcagcctcagcccgctgctcacctcgccttgtcccccacgagtggaggtgaggagaagagagaagagaggagagagaactgacaggtgtgtcccatgtgcaatagggtcaagtgagaagggcagaagggatattttgtgcttcagttaacaccattgcatgcccttaacagaatagggtcagactgaatcttcaattttgaaaagaagggtcaaataagcaaacttaataaaataaggtcaaattaatacttagctttcaaaagagcgtcagttgtgcaaatgccccaaagaagaacatatgctctctggattctctaacacagggtacagctggagcattgaaccgaagcatccaatggagcacagtgctttctatccagaaggtccttgtattaacccagtccataaagaacaaccacacaaaaaccttaatcttcatattaacctcacttttccaaatccaataggttttattattgttgttactagatagcctcggttagctctttaatttttgtcggaatatgcatgcgctacataaccttaagactgttaggaaagaaatgacgagaatgcctcaccccgggagtctcacgtctagaaaaatatcggacactacggtatgggcttgggtcacatcaatcataatattttctcaaacaatccaaacgtctctctcctcttcgtcctcaaatatataggaaacccgtggaacatatctaatttcactattttttttattggaaacccatttatatatgaatatccgtggcaccagaattcgaaccttggtgaataaagtcatgtacccacgactccattgttaaaccacttgtgcttcccctactccaattatgatattatccatttttttataaaactttgtgatattgtccttatattttacccaaaccttataattaccccattccgttaagacaattatatttgtcaaaattcttgttaacttttgtactttccctgaattcttttaactaaataagtagaaattcgtattaaaatcaatgttttaaattagcgggctaagatatttggtgcttaactttccaaacagctatagcgggctaaatggagctatagcggctaaattgtactcctcaaacagctatagcgggagatttaaaaccctgattaaaataggggcaaaatttataaaatgaagcttaatgtaaaaaaggagcaaaaatataaagtctcggaaaagtaggaacgaatctgcaaaggcatactagtggattttaacaccattaagccactttaacgtaatatatatataatgagagcaaatgcaaacttcagttaaaaatgaaaaaataaaaaagttcaagaaaataggtacaaaatcgtaactgaagtattacaaaatcataaagttaaaaagatagtataatcgtagctaaagttaattacaaaacaaaaataagagggtgtttagatccaggggcgtaaagttttggcgtatcatatcgggtattatatagggtgtcgcatgaagtgttcgagcactaataaaaaactaattataaaatctgtcagtaaaccgcgagatgaattcattaagcctaattaatccgtcattagcaattgtttactgtagcgccacattgtcaaatcatagagcaattaggcttaaaagattcatcgcaatctgtgcaattagttattttttagcctatactccctctatcacataatataagacacggtcaaagttagcacggtttctaaaactaatctttagcttataatttttaatatactataaggtttgtaacaacaaaattataaccatatgaaaataaatttaaatatcaatctaatgatatattttttaacaaataaaattcatttcatactatagtaagtattggtcaaatgttttaaaggttaaatcttaaaatgcgtgcacgccttatattatgggatggaggtaatatttaatacttcatataggtgatcaaacgttcgatgtgacatggtgaaaaattttagggtgggatctaaatagggtctaagaatacaatgctctcttacacggtgatcttgtgggctgtctgtcgtaagacctgtgaatctgaggtctaaaccgggcctagctattaggccgttaaagttgcttgttacttccacgtagattcggctcatccacatggacatgcgctctggatgcaggcatgaatgtaagtaggtaacaagaaataaacaaatgatgttttagttggaaaaagtcccaattacctctttgaactattgtggtattgtggcagtatgaattaccctctcaattaaaaaatcagacattcttcaccattaacttcttataccggtcgaaataccctcctaataaattcacatatggttttggtcctacgtggagcataaaaaaatatataaaaaagtaggacccacatgtggtgaccgaaagaggaggcaaaactgacaagtgagcccctcttattattattatttttagtgctaactggattgttataattcatccggtacaaaaagttgagagtgaagaatgtctggttttttaattgagagggtaattcatactatcacaatagtttggggtaattcgatttagttttaacctattagattggatgggttgttattaaaacacatatagcagatacatctactctcttgcatataggcgagggaaaccggactatctaggaatgtttagtttgttgctaaattttgccctttgatttcttgtcaaattcttgagacccttggaggctagaatgttcctctcagtgattgtaatcagtatttccataggactattgtaacatcccacccttcagaaccatgcagcacagcccaactgataggtgggcccatttacacatactaccccacttacactttcgtcctcgttacgtataaaagggttaacctagaagtgatatggttggattggcaagccgttataagttggttccactcatgctaaactagtgacgtggtaataaacatacgcacacagctcttatgtgcaacataagctaaatcttaattgggccaggatgtcacatgataaggatgctaggtcccgatcttccgataggtattgataactctcgatttggtgaaaacttgacacacacgatccggcttccgatcaacacgatctaaaccctacaatcgcagcactacttctcccctggttatcagctgtaccgaaatccggttgacatcactgagaaggctaatccctgcatgcgaatcaaagaacacaagtaagaacaagatagattgcaacacacttgcatatgaatgattaagcactcaaatttagggtttcacaaaccgatctagcagtgaaattgttcttaacaaattaatctaagcaaaacccgattctaaactatgacggctactgaataaatatgattaaggatatcctagggttaccctagggtgcacaccccattgggcttagcctaagacccaaatcagattcgaactagatgaggtatgtagcttgttttgtagatttccgatagcttggtgggagttttgacgtgggacgaaatccatttgaaagtaaacttcataagctttacaacaagtactcatgggccctaaaattccttctagatcagcatctagatccatttgaatgtcaggaggcctgaatccgaatctaaaatgtgtagaactttatctcttgtcttctatggaccaaaattgacgtggtgagatagaagtggacttggagaagatcttggtttggtccccaatcaacttctttgatcatccatgcattcctaacgctcggactctttttccttcacccaagtaagtacatctccaaacgagaacacacgaaactcattatgtagcaatatttgttcaaatatataacaagtaaatctaatatagaacatatatacctttggttgatgaatacataatgtagttatggttatatccgagctagttgtgttctcatcacccctcctaaaaaaaaaagacccgacggctccgtcagtccaacttacccgtaaagccagacaaacaccccaaaggacccgatggctccgtcaatccaacttacccgtatagccatacatacatgtaggcaaatgtccaagaacacaccacctcttagcgcacattcgtacgtccagcacagacaccatatgcatgtcacgtgccttacatagagccacatgcatgtcacggaatcgcttaaaatcgaatcaagtctgctcgatcgatcggttaatttgacagtggaaactgactaaacatcccatcttacactcagcatactgaaactgaatgcctgttcagtccacggacgtgcatccatcgttcagttcttttggcgaaagtgtaaagctattttcttctaatgttatcagatttgttgataacattgctgaggtacttatattcgattgaacttgcatggttttggataaaatttagctgaaaccaaatatgttcataaacctaattcaattcagtgaagtgttaacctgaagatctgctcctcccgatcgaggcagtgttcttcctcaaagacacaatataataatacattttgaaaggaaaaaaaaaacatagaaagcaagggatgaagaaatgttggagagtattccaaactcgcgtacaagggaggacgcagggagcctgacaaactccatggaagggttcatatccgagctccactgagcccctccaagaacacgagcaaaccgtgcccgagggagatcggattaatcaacagcgctctcggttttgcaacatcgcatgcatccacagctcatgtgatcacgcaaccaatcaatagaaaaaacaaaacaagtaaattgagcgagcaagaagaaccggagaattcagagaagcgctggagatcaagaaccgtaagggggataaaaaaatagacgctactaattccatgtcaagaatatcaagatcgcgatgcatgcggcgagggttcatcagagcagcgaggtcggaaggcgacccaaccaagccgtcgccgccgccgctgctgcccgacgatgtcgccgccggcggctgccgctgatgcgaggagcaggagaggaagaaaggggagaagccctagaagcggcgtcctcttaaaagggaggggcttgagtttacgggccgggacgattttaggccgatccgtaacggagaggatgggccggtttcttcagtttgaggtccgttggaggttggccagtaggcccaccaggaatgcactgctcctcctcttttcggtgaagtgctcaagctcaactgctcaagaagtcaagatcaaggctaaatataaagtttgagttttctaatctcttatgttgcaataacattcaataataaaatcgataagtatgtaaattttgactgaccaataatcatttttttaaatgatattgtttctgtcagttttcatccttccacgttgcacggttacacctaacgctgggtaaagtgtttgtgattgcatagattacaaaatttttgttctgctggcaccattgtttttggggcctgttgggagtgtagggagttttctacgccaccactctccctctgtatagggagtggcttttcggttttttttgctggttttttcttcctttgtccacgggcaatggctctctgattgtttacgttgtgtaaccggaactctgctataatatattaatgtgcaatccttttttctattcgtgaaaaaaaagaaatatcacatataggaattcccaaattcaacggcacatcgcattggaatatacgcggtggcaaagggataaaattcgctcatgtaggccacgcacagtcaaatcccacatatttaaaatatgaatatagctaggacaatttaaaattggtacgtagattagttcgatatatacgcattcacttgatacatacttatatattggtatatgtatataaatgcaacttgcaacctgtaattggccctgttataactccaaatttcagcttccttattttccattagcacgttttgtaacatgttaaatggtgtgttttaaaaagtttctatataaaagttattttaaaaaagcaactaaatcatttttaaatttataataattaatacttaattaatcatgtgctaatgtcgttttgcgtgtaactaaaatttatcttcaaatgtggagatcgaatagggcccctagtatacttatagcacatgtgcacgtacagctagctatccagacagtaacattgttgttacgttgtggcgacatatataccggcaataaactaaacggataagcttgacagatagacaacatatagctcaatccgtttttaaatgcatatacaacaattttgacttttaaacataatatttaaatattcgtacatcttatctaagatttagcgtaaatgtgcatggtgtagttaaattagacttatagtaccattaataataaagcaagtcacatcaaaataattgaaaaaactttcatctgaaagcaaaacaaataatatttatataattttcttaaataagataaattttgaaagttgttatactcccaaaataaaccaacttttaactcactactggaaaaacaattttcgtagacgacacccatttcactatgcaggtggatcaaaatgccacctgcattgtcgtggatggggaaatgatggtcattcaccagcgaaaatatatattccagatggacgacttaagccgcccatctgcgaaaaaatatatatcatcacaggcggacctcataaggctgcacatgcaaaaattaatttttacttgcggacctcctaaggccacctttgcaaaaatcgacttttgcaggcgtagccttatgaggtctgcttacaaaaacgggttcaacagtattatgaaccagataacatgaatcatccaagcataagtcacttcgcctctcctcctctcttctctccctctcccttagactcagccctcccctccctctccttctcagctccggctggagggaggaagggcggcggtggcgcagccctcccctccccaccctcccttcctcccagatccgaaaaggggggagggcaccgacaatggcgacgcggcccacccttcccgtacctctcactcccatatccagccggagagggaggcgtggctcacccttctcctccctctccttcctagatttggccgaggggggaaggcagcgacggcggcgcggtcctcccctcccctcccctccgtctcatgtgaaaatgcgaaggggtatataaaaatcgattttcacatgcgcacgctagcttaagccgctcacttgttacaacatctcagatctatgttttaaacaatccctgatgaaaacatgctctgcatcaaagttttagagctcaaccagatctacaattttgtaattaattgatgatcttttcatttaagatcgtttagagcaaataagcattttaagttgcagagatgtgatgttcaaaagaatagcatatcctaactctaaacaacgagtacttaatagtgtgaccgtgtgtggactatgaggtctagagtttaaatcttctaggagtacatcatactcgtgtatttcgtggagaaaaaatgatgtggcttgccacttgcatctagtagtcggtttgtccgcctctgcgcagtagcgttggtttaattttggaacgtaaggaatacatttgggaataagagcaatacatgcctagtatatacgaaggtgagaggctaaagctagtcgacatggcatccagctggaaggagagctacctctctacagagcaacagacaaccatcgtcggactcggaaactgacatgcaattaaatggcccaagcgaccgtttgcagctagcggcatatgcccccacccaattaaccttagatatcagtttttccaaccggtaccaccgagacggtactgttgactttcggtcatcaatgctggttttagaactggcacctttgaagtgcacatgagccaaaaaaaatcggttgtcaagccgatcccaaaattatctcaaacccatgaactcatctagatcaaacaatacacatctagctctcatcttgatcaacaaatcacaaatcacatatcaacaaatcacatctagatcaacaaatacaccgccgccgccaccgatgccgccgcacgccgctgccgcagagggaagggtgctgccgggccgccgctgcccttccttccgccggatctagcggagggagggcgcctccgggcggccgctgctcctcccactacacgccgccaacaccgccccacgccactgccgcggaggagagggtgccgttaggccgtcgccgtccttcctcccgctggatctggcagagggagggtgcctccgggtggacaccgcacctcccgccgcacgccgccgacgccgccgcacgtcgctacagcggaggggagggcgttgttgggccgccgccgcccttcctcctaccgaatctggcggagggagggcgcctccgagcggccactgctcctcctgccgccgcctccgccgccgggagagaagaaagagaagagaaggtgaagagaagaggagaagagaagaaactgcggtggagagagatagagagaaagtgcggtgaagagaagaaaagaggaggagaaggtggagagagagagagtgcggtgtgtgggtgggctgtggataagaacggctagaaatatctctccctcccccgtgcggctcagttcggttttatggatgtcaggtttttttaaaaaccgacacttatagtactggtgttggtttttatacagaaccggcacctataatcacttaaatatgttggttttttatgttttcggaccgcggaggtgggaaaaggtctatatgtgtcggttttaacacttccggcacctatagtgtcgacttctatgtgtgtttctgtagtagtgagtagtaataaattccaaaaaaaataaaaaatactccctctgtcccataatatagggacataatataagggattatgggacggagggagtaatttatatcgatctactaaaaatcaacaaattcaaatttgaccaacacattgagaaataaaaaaagacaaattaatatgtgaatcgtgcgctactgtttatatataaatttatcttttttatatctcgacgtgtgagttgagtttaaatctaagattttataaagttgtatatatatgttgtatgagtcctatcaaatttttttcagaattttttattatcgtttggattatttttagcaaacgaagtaacatcgcctcgtggaataaaatagttcccctttctgcgtgcatgtatgcttctctggctgtgtgagtgtcactgatcagttggacttggcactcttcaatactatgcgcgtatagaattcagttgaggttcagttattagtacgcctaaaagtctgaagaaccaagtgcttgatagtattaattattgcgcatattgcgcgagttatgcatgtgctcgtagtaggaaacgattgacaatttgacatatagtttccctatatatatatatatgcatgcatgttttgtataaataaagtgtcaacgaccaaacacaaaatcgatcaccatcagcaccgctactttccagcctgaatcacgtcagaagctaagtatttcgttggtcgatcgatcaagcccgtataactgcactccagtttaattaattagggtggtcaagtggtcgtcgccgggcacatgctcgtgtctgctcgtacgtccgtccatccctaaaatgctgcgagtcccgatcgaaattttttttctctgaattttgtatacttgctcagctgaatggtgtcagaactggaaaaccaaatattgacagaggttgtttccttctgcggaattgctaaccttcggctgtgtttagatccaaagtttggatccaaacttcagtccttttccatcacatcaacctgtcatacatacaacttttcagtcacatcatctccaatttcaaccaaatctaaactttggatctaactaaacacagccttcgtttgatagaaaattgaagcctaattaaattatgtagatttcgagtcgtatctactttggttatgctccaactccgacgacaaatggtggtgaccctgaccctgaccagttaaggttaattacgttagctcgtatctcatatgtggtctgatgggcatatctcaaataccaaaattacgatgggcacatccaccactactagaaagactattttctagacgatggcaaaatatttttctaggcgggtagaactctcgaagccaaaggaccggctaaaaaatggcaagggggaggaggagggggagggcgatgacagtccgtctgcgaagatacaatttcgcacgcggaccacgtaagatagcgcctgtgaaaataccaaaattaatatgtccaatttgcatgatcgacagccccttgcctcctatattcatcgatccacagcaaatgtagtttaattccaagctaccgatcgaaccatcttaaattctgtcaatctgttttgaatattattcttttattcacattggatatatatgatcctgtcatgtctcgcctacgtgctcatcacggctatttaatggcatcaatccgtttctcacatctcttaagcgaatttatatacgatcggtatacgtgatcacaacatgcatgaacgtgatcacaggaaaagataactttaaaaaccacgatttgccgagataaaacctaagaatgagacacgaagcttaattcaaattagctggttgattacgatttttaccggtgaacacaatccacgcttgaactttatgaattgcataaattaatgcatatgaatgtattttgggggaaacacatacaacttggtagagaaccaattacaaaccttggtgtccatgcttaggggtttattgaagtcctagtggtggtctcgtcacatattcgtgaagttatccttgcatttttcctattatgcaaaccacatgcatatatatacatcatgtagatagagaccaaagataaatgtgtgaatataataaaatttttatcagaagctactaagctagtgtatccatgtgtagtactaccttcattccaagagaaaagttttgcagtccttgagaaaatatctcaaggcacattaaagtttgttgtaatttgagatacttactatctggaggtacattccaaaatatatgataatgattagtttatttttaaccaactaatctcattccaaaaacaaatagagggactatataattttctctgatcccctgtaaattttgaactgtactcatggtctattgcgcacgtctccaaatagtaatgccaacaacatgtgtgttatctaaacaattttttttgttccattcaatccattgggcattttttctgagcgatacataaacgataagcatatttggctgcatatatatgagtgttgcatttgtcaacaggaggagaaaggtctttgaacttctcgagtgttttttccacttgtgtagcggcctaactttgaccccccattttcgtcatcgaaaggtaccccttttgcatgcatgcaaatgcaacctcagccacactataaatagcaacacatttgttacttctcagctcgtgccagccacacatcaagtaagctaagctactgagctaactcagcttagctaagcttagctagagctcaagtgattaagcaagaacacttagttactcatagataattaattaattaagatttgtgagattaccatggcttcgaggagtagctggcattgctgcttgctggccttcttcctcctctcgtccgccgccggcgccgcctacgggcagcagctgtcgacgacgttctacgcggcgagctgcccgacgctgcaggtggtggtgcgcgccaccgtgctcggcgcgctcctcgccgagcggcggatgggcgcgtccctcgtcaggctcttcttccacgactgcttcgtccagggctgcgacgcctccatcctcctcgacgacgtgccggcgacgagcttcgtcggcgagaagacggcgttccccaacgtcaactccgtccgcggctacgacgtcatcgaccagatcaagcgcaacgtcgagctcctctgccccggcgtcgtctcctgcgccgacatcgtcgccctcgccgcccgcgacagcaccgccctggtacgcgccgcccaccgacacacacaatgttcgaattgattccatagattctgacggcgacgcgcgtacgtgcagctcggcgggccaagctgggcggtgccgctggggcggcgggactcgacgacggcgagcctcagcgcggcgaacagcgacctgccggcgccgtcgagcgacctcgccacgctcatcgcggggttcggcaacaagggcctgagcccgcgcgacatgacggcgctctccggcgcgcacaccatcggcttctcgcagtgcgccaacttccgcgaccgcgtctacaacgacaccaacatcgacccggcgttcgccgcgctccgccgccgcggctgccccgccgcgccgggctccggcgactccagcctggcgccgctcgacgcgcagacgcagaacgtgttcgacaacgcctactaccgcaacctgctcgcccagcgcggcctgctccactccgaccaggagctcttcaacggcggctcgcaggacgcgctggtgcagcagtacagctccaacccggcgctgttcgccgccgacttcgccgccgccatgataaagatggggaacatcaaaccgctcaccggagccgccggccagatcaggcgcagctgcagggccgtcaacagcagctgatggattattgcttatataagtgtaattaattaaggcattaaacatgcttaattaatatgttcatggtgattcgcagctttgatgttggttacaaaggtgaccaacccatatatacacatgatatacatggatgaataagtaagctatggaaagtacacatatgaccttgggttgaaaagtgatggatcaaccaagcaaggtcattataaatgggaacatctgtttatcatgtgctacactaaaggtgcgttcgttcctgggggattgggtgagaaagcccatcgtattccgcacgcacgcttcccaaactactaaacggtgcatttttgacaaaaattttctataggaaagttgctttaaaaaatcatattaatccatttttgaaaattaaaatagttaatacttaattaattatgtgctaatggcttatctcgttttacgtatcttcctaatcttcttaatccctttctcctcgaactcactctaagttgtgaaactatatctggatgtgcaagaatttctacaaacaataaaaaaagtttatgcttctctgctgccataaaaatattgtgattattctactacttaccattgatgaacacaagttctccgtatatacaatattattgtgattattctactttttaccattgcaaacactattttcatggcagcagagaagcataaactttgtttattgttgttgttattgtgattattctactatttaccattgaaaacactctattacacaacttctctttctcccacgttttattattgttgttactagataacctcggttagctctttaattttagtcagagtgcatgcattacataaccttaaagttaaagagtgtttgcaaataatgacgagaatgcttggcctcgagagtcagatgcccagaaacatatcggacactacggtacactccatatgatgggcttgggtcacatcaatcataatttttttttgaacaatccaaacgtctctctgcccttcattcccatttaccactgagtgagggtcctctgcagtactacatatgcagtactgctcactgacatgtaggccccacagacccttaggtctacatgtcagtctgcagtactgaggatctgaattgtttaccacctagtagccagtacatgcatgagatgttacatgttacgtgcagaaggtctatggacaatacttaaacggtttcctaaaaattatttatcggatcaactatctgattacactgctatattcgttataattaaatctttataataaaatatcacacatgattatatttggatgaaaatatatgtttcaaccattgagtttcgatgtttcgcacgtgagaaaaagaatgtttcaactgaaatttacggtagcgctaatacatgcgcagtgcgttgtttgttaattcaagtgcctgacgtagcgatcttcaccatgttttccttttttcccctttttcagtttccctcgcctccgcctccggttcccaatccacccccttctttttttccgttttcaatttcaactagcccaacctctggttcccactccttccctgagcggagtttatccctttcgttttttctacaatcgtatcgggagtaaaagaattactataggatatatttgcaaagtagtatattactatcaagtaaaagatttacttttactttgctttcgtttttctacagttgtaccagagtaaaagaattactatatgatatctttgcaaagtagtatattactatcaagtaaaagatgtacttttactttgcattctcgctagaatccatttagtaatttaattatctcaaattcttctccaaaatccattcaacaattgatttaccatcaattgttcgtaactattttacttattcttttattggtagggcacactgttatggcagagggcgtcctcatcggcctaatgtgaatccacggttgtgacgtcgaccatcacgtcgacggaggtcacctccctctaggtgaggactataaccgcctgggccccgttggtggagggttggggttgcgcagatcagccgatgtccaagcagcggaggcctatggttgcacagatcagggtcatcggcgacgatgaacaacggggcagttggtatggatggagccgaagtcgcctccgctaccggccaccggccacacttaccaaatccggcagcgacaacgacctcaacctgccctccactgccggccgctctccttcccaaccctagctccgtcggcaacagcgttggaggaaggctatgtcggccgagcaagggaggcacgatgaggaacgcttcatccgtccgagcggcgccggcgaggacggtggcggctgtttcggccccatttgccgcttgacgagatggtttcactacatccgtaaaagtaggaatttaactcctcagaaaaaataggacggtatatataataagatatgaaattgctagtaaaacaattactaggggagggcgtgggaatcgagaggtgggagggaggtcggccagatcgggatgaggcgcgcgatcggctaatcaacgcgctaccctcttattagtagtaccactgaaatttaactcttttgcataatataagttattgtgtttctatgaattttttaaaatgttgcgtatggtatttggatgtttcactaagtatttctaatgtttcactaattcatttgaaaatattgcatatggtattcttatgatgtttcaactagattttgtgttgtttcaatagttacaactcaatgtttttaactcttttgcacattgtaagctattatgttgctatgatttttttttaaatgttgcatatggtgctatttggatgttttactaattcatttgaaaatattgcatgtggtatactggtattcttttgatgttccagcaagttttcatgatgttccaatagttacaactcaatgatgcatgtgcaatatataaatattttagttaggaaaataataatatattttcttatcaaagaaacataattattttggatctttttaaaaaaatttagttacaacaacggtggtacgatcgaattgtaaattaaataagtaatttagaaaaaaataataaaaagttttactaaaagtatagcgagagatggatgggtgtacagtcgaacatgatggagtagcaagcaacggaaacaacatgcatgctctcccaagagtttggtgggcatgcacgcttgccgggatgtagggggcataaggcttccgacgcgtagagtcctctcaataatgcaattaaatatactattattttgatgctagtgaaagaatggaactgaatctcactatgcttagcgcaatacatttgcttaactgcttgtgtgatatcttaggggcaaaatagtcttttcttatatgctaacggaggtccactgacaacaatgacaaaaaaaaaacaaagagagagataacacatgtatcagggcatattgtttgtgttgtgcttggcaatgccgaactatagaatccgaatgattgccaataagtaaatcataacactcgggaaccattcaaagcagtaattttgcttcacacttttttttttgccaaggaacattgatttttattttttctatgctcatttacattggtacttcttacatattattatattacttattttctttgaatgaaggagagagggtgtgcttactgaatgacaatattgtcctttggaatgttacacaaaagggtgactcgatcactgcatattacacaacccaaaccacttgcctttgccaatttccctactcacatcttctccttaaaccctagacatgagtgtgacgcattagataggactaaggccaaagtgctgctattttttttccttttagtattctctcacctactcaactttagattgtgattgtataatagccctaataggtagatgttggctgcaaccatgctacagttgtatctgcttcctgcattgttggctatggtttagggggattgtgcaacacaacttgtcacagataggggtcatctgtggtgggcatacattcggaaccgacaccatggggttttctgtcggttcgaaaattcgacctatcataaatgatcctccattaatttgtgacaggtcgtgtctactgcctaacctcaaacagggtttgttttgaccaatcagagttcattgccactgcctatgtaatgggccatgagggctatctacattgaccgtatctgtagtagtgagccccaattaccgcaaccatcactactgatcatgctcaatgataatagacacagagtactcctgaggcaaaggatatgaaacttcggtgtcctaagacttgtgagccaagaaaataaaaatagtacctcgttcattgtcatgagttgcattgtgtttttaccttgaaggatttgcatctcagaatattaaaattgccctgttaaattaatctatatagtaggtactaatgccctattaaattaatactaaggcttaattgatttgtatgaaaatcataggaaatttaaagggatttctatcttactagccacgtaagtcgcacgttgcgcgaccataatgacctgtttgagaggtaggtgtacattgatgcaaactgtgcgtaatatcgtaagggttatacagggtatgaatatctataatcgtaaagagtaagaacattgcaactgaacttaactgctagccgcaacgggggaggaggcagtggatgtggatggatgcgttctggcttctgggattagatgggttttttttacacctgttcagtgattcctatatatacactaccgtgaatgtgggcttctccttttcgccacctttcgtctgctgtgtggaccatggaccgttggctacgtgaaaactctggaggattctactgttgaccgggatttttcactcatgtttatttcagatccaatggcaccaatttaattccttgctgcatccaacagccctaaatttttgatgacgtgacgctttgtggtagtgaaaaactttagtattttcactactttagatagggaaaattcctgtaaaggtctttgatatagagaattgaatcatatttttttccttttaaattcgtatgatatgaacaatcctatagacaatgtttggaaaataggtttgggatatgatttcccactctccaataggtaagtttcaatcttagccattcattcatctcacctcattttatcatatccctccattcatttctatttcccaattccacctctcctaacctattttccaaacatacccatagagttttttaagttagccagagattcaatctcttgaaaaatttcttttcagtatatctctctcatttaattcctatgtttttcctacggcctaatcaaacaaccatattcctgtgtttttttttctgtgctttgcaattatctattttactcgctattttaattatgtgtttcaaaggaaccctaaatatctacccctggatatcttgcctacaaaacaggtgatcattactaccttgagtcgcaagactaataggtagtaatagctggcttgtttgattctcccttgagttctttagatctccaaggagccaacggagaggtcaaacaaagccgaattgtcacaatcttaggtccacaagtccaattcactgcatgcaagcagacaagaccgtttgctttccatgtggatgtgtcctaaggtggcagattttcatttggttcagataaacacagaacaaaagtgaaatataggagtatatgacaaataatggcagaaaggtgcactgttgatgatgacaatgggcatttgttagcatatcaaagctaaatcaccatgccaatagcgagcataattaagttgagaatttttttttggagaaaaacatatgagcaggcgtatcaagcacgatattaccattctaagttttgcagagataattttcaaaatgtctctaagttttgaagctctatagtctagagatattttttagaggcacttttaaaatagcctaaaatatttttactctagagacactttagagacatttttagcatacattgttaaatttatcttgtagagacatctttttggcactttaaaatttgcctcatatgtaaaggcatttttttaaggcatttaaaaagatgtaaaggcatttttccaaatattaatatatattaagtaactagatataagtaacacaaatcacatatttacgtgtaattatatgaggttgggatggttagtgcattgaagataaaaatggtcaactcaagaggtcatgagttcaaggattggtaaggaacaatatttttttttcatattgatttgctatagttgccgcaatgtattaatgcctctacaaagtgcctctatttgcatagacatcttataaaatgcctcttagtttgtagagacaattcaccaaaaggcacttatgagacactcttcaaaatgtctctatagcactgtaaagacattttaaaaatgtctatatattattgggaaaatatctctacaaggtatatttattgtagtagagcaatgatatagaaacggtagcagcatgcaatgtacagtggaagagaaagagagcttacctcgagggggctcctcaattgcgcaggtgtgctaggagagaaagttgtgcacgtgcctatccgaatcagagctgctgctcctttcgatcctttcgtcctgcaattgactctccatgcaaccggagagaacccgaattataaaactttcaactttgagcctaaaatttcaataaactttctacttgtgcttcaaactttcaacataaaaccacaaacttttgattcaaaaccagaaaatttcaactaaaaaattaaaaactttccacttgtgattcaaaactttcaatataaaatgacagaacatttaattcaaaatctgaaactttcaattaataattaaaaaactttctacttgtggttcaaactaacattatacaaaatcacaaaaaaatttatccatgaactgaaactttcaactaaaaatttaaaaatattctacttgtggttcaaactatcaatataaacacagaacttttgagaaaacaaatgaaactttctagtaatttttttttaaaaaaaaactatctacttgtggttcgaaatttcgatataatatcgtaattttttattcaaaatcaggaatttacaaccataattctgaaactttcagtggtaatatgtgcaactttataactcagacttttagctcaaaaaccacaaaacattctacaagcttaatctcgaacttttcaaagcgaaagtttgtgtgatttgcctaacacgaactagcggtatggagcttaccagtgtccaaatctaacaaaggaaagaataactcatcacgccttatcgggtagagattaggaagaagtgggaattatctgaatctcaacgggaagaggaagaggatcgaggtaggggcagcaagcccaagcctacaaggaaggacaagactagaattcatcatggaggatgatgatgtgggcgctccctgccgtcttgccaagagtgaggctggacgtgggggagccaatgcatgcgcgtagggcccgatggtggagggaaggtactagtgtggcgaagctgcgccaaaaatcctttccatgcctgaggttgagaccgagctcctaatggcccaagcctgatttttatcgtgacaaatatatgagaagtacacaatttattttctgttcgaataggcagagagcagctgtaaatttaccgggtcaaagccaatccaaataacttttttgtgtagttggtaataaaatttggtgctcgtaatttacaccggtttcgtgccacttattagctaaggccctgtttagttcgtgaaatgaaaatttttgggtgtcacatcagatgtttgaccggatgttggaaggggttttcgaacacgaatgaaaaaactaatttcataacttgcctggaaaccgcgagacgaatttttagagcataattaatccatcattagcacatgtgggttactgtagcacttatggctaatcatagactaattaggctcaaaagattcgtctcgcgatttacatacaaactatacaattagtttttcattttatctatatttaatgctccatgcatgtgtccaaagatttgatacgatgtttttgggaaaacaaattctgggaactatacggggcctaagtttcatagtaggctataagtgacaattccccccctccccctcatcgaatcatcgtaagggttcactcaaatattaaaatttcagtgttaaaaaacaaggtgaaataattgatattgtaagtgatcaatctcagtgcttttctccaatttgaaatttgcttcaattccgatatgatttaattgtgacagattgaaatttaatttgttttgaaaagatcaagataagaataccatagttttttgtgattcaaaaactttcaaatttaacattttgatcaagaaaaagaaaatcactgcaccaactcactgaataggtatgttagggatatcacaagtaaaccctaatggatatactccgtatatgccaggatgaaacaaagcttaatcaagacgatggatggaatgatatattgagcaaaaacaaggtgatatatatgcaaggaacgaaatttcctccagataatatgtatgtgttgtaaactttcattggatttgtgaagttgtgtgagcgatacatagccgataagtttatttggcacatacacctatgtcgctctcgtcaactggaggaagaaaggtcgtagaacttgcccatttttttccacaagtttgtgaccccccatcggcgtcatggaaagctaccccttttttgcgtgcatgcgatctgatctcagccacactataaatagctagacaagtgtaacttcttagctcgtgccaatcacaagagcaagaagctactgatcttagctgagctagagttccagtgatcattaaggaaagaattagcacttggtcaatcacacataggtaattaagattaattgcgatcgagatcatatcactagctagctagctgtgtgtacggagtacggtgccatggcttccaggacttggcattgctggttgttgctcgtcttcttcctcctctccgacgacgcctccgggcagctgtcgacgtcgtactacgcagatagctgcccgtcggtggagaaggtcgtgcacgccaccgtggcgagcgccatccaggccgagcgccggatgggcgcctccctcatccgcctcttcttccacgactgcttcgtccaggtttaatcatcttgtaaactggattaatttgttaatcaccacgttataatgtcttagggttctaacgtttgcaactttgcaaggatgattattgattaatcatggtattaatgatcgatctgcaaactggtccagggctgcgacgcgtccatccttctggacgacgtgccggcgaccgggttcgtcggcgagaagaccgccgccccgaacaacaactccgtgcgcgggtacgaggtcatcgaccagatcaaggccaacgtcgaggacgtctgccccggcgttgtctcctgcgccgacatcgtcgccctcgccgcgcgcgacagcaccgccctggtacgttcacccgagtgttcgacgcgtgctcgtgacatgcgtggcgagctggtgtgtgagcgacattcgtcttgtccatgcagctcggcgggccgagctgggcggtgccgctcggccggtgcgactcgacgacggcgagccgcagcgaagcgaacagcgacctgccggggccggggagcaacctcaccatgctcatcgcgcggttcggcaacaagggcctaagcccgcgcgacatgacggcgctgtcgggctcgcacaccgtcggcttctcgcagtgcaccaacttccgcgcccacatctacaacgacgccaacatcgacccgtcgttcgccgcgctgcgccgccgcgcgtgccccgccgcggcacccaacggcgacaccaacctggcgccgctcgacgtgcagacgcagaacgcgttcgacaacgcctactacggcaacctgctggtccggcgaggcctgctccactccgaccaggtgctgttcaacggcgggtcgcaggacgcgctggtgaggcagtacgccgccaacccggcgctgttcgccgccgacttcgccaaggcgatggtgaagatggggaacatcgggcagcccagcgacggcgaggtcaggtgcgactgcagggtcgtcaacgacagctgatcatccatgggctgtatatattttcatgtggatttgtggtgacgtatctttgttgtaaatactgtgatgcaataaagcagcgtggtaacatcgttgctattttctctcaatgctctttgtggttttactccttccgtttttaataaataacgtcgttatgtgtttaatcattcgtcttatttaaatattttatgtaaatgcataatacataaatcatgcttaaagtacttcaagggataaaacaactcgcaataagtaaaagatagttacataaatgttttcaatatggtcaaacgtgtttcaaaaatcaacgacgtcatctactagaaaacagaggtagtacaatctagcacacatgttcaagtcgtcgatccatccaaaaaaaaatagctttcttgtttgcattcttacccttattttctactcctgttacttttttttaacaattgaacgacatacaaatatgtttacacacaccactgcacacaacaccacattcatacactaatgaatacatccctaacacacgctcaaagatataggaaaccagtggcatatatctaatcccattaattttctattgaaagctcacttacatgtgcataatatcggtggcttcccctgctccaattacgattttatccttaattttaactttaagatcatgtccttatatttgagctgaagcttgtgcttaccccattccgttaagatgactaactatgtagggtcaaaattcattttgagtttgctctatcccttagttttttttttactaaacaagtggaaattcgtattaaaataggggcaacatttataaaatgaagcttaatgtaaaaaaaaaaggagcaaaatcataatgtcctcggaaaagtagggacgaacaccgttaaatcatgttaacaagagcacatacaaacttcagttaaaaatgacaaaatcaaaaacttcaaaaaatagggatacaatcttaactgaagtattacaaaatcacaaagttaaaacaaaaggtaaaatcgtagctgaagttaaagaacagaaataagaacacaattgtccatttttacccagagatgactacacggtggcccataaaccaggctgtcttacaaggtgatcttgtgggctttgtctgtaaggcctgtgaggccatctgaggtccgaaaccgggcctagctcgtccagatgttaggacgtcaaaattgcttgttagttgattggaataagtctattttgctccctcctctcttgcttcgttgaatcgtatccctcaatcacaaaaccggatataacaccttgcacaatttcaaaaaccagttcaaattgactctttgggtggtttcaaaagcggtttttccataatgacagatcgacttggtctaagtgttttcacgtggtagcccaatcattaaaggagttgaatatagaagggggacggctaatgggcggcgatcacaggcccacctgctccccctgtatgctcccttctctccccctttctcctctctttcttctcttcatactacagtacaccatacaattttaaaaaataaaaaaacaaagttgaaaaaatttatgtatagaaatacaaatactatatataaaaaaaattgaattcaaattcaaatttgaaatgagtatgtaaatttttgacttataaactttgggtctataaactaatatttgaattcaaattcaaatttgaatgggtatgtaaacttttgacttataaaatttgggtctataaactaatatttgaattcaaattcaaatttgaacgggtatgtaaacttttgacttataaactttgggtctataaactaatatttgaattcaaattcaaatttgaacgggtatgtaaacttttgacttataaactttgggtctataaattaatatttgaattcaaattcaaatttgaaacgggtatgttaacttttgacttataaactttgggtctataaactttaggtgtataaactttagatgtatagaaatactatatataaaaaatatttgaattcaaattcaaatttgaatcggatatataatcttttgatttataaactttgggtctctaaactttaaatgtgtaaacttgaggtgtacgaactataggtgcataaatttattaaaataggaaagtaatacggtgtcaaaaaaagaaaaccaggtggaggaagggggatccggatccgatcgccctgggcgatcgctcgcccagtagcaattccggcccgcaatgccggtttaccagtggcggactggacaaagttggccgttgatatcggcggggttggcaaataagttccacatcccgctgcagccgaggcacacgcagcaggctagaggggctcgcggtggcgttccacagctggtcctctccatcgccgccctcttccgcctcccaatcaacgtcgtccgttccacacggcggcaagcagcaacgacggaggaaaccccatgggcgctgacacgaggtcctccaaggtccggtgctcgccgtggaggcggcgtgcgaggtctattatgtacacgcgggaaacagagaactgtgtcgccttgacgccgaacagcctagcgacgtcggcgatccacggcgttgggaactcgaagagtgcaacgacccgccagatccttgcgacctcctctctatctcctcgactcctctaggctggccggcgtgcagcgcacctcctttcccttctcccctctctccccagatgtgggaggcaagcaacaagcggcgggagtggagctgggcggggcggctggtgggagatcctagtcgcatgacgtcccgtgcctcgtcgcgcacaacgacccaccgctcgctctcgttgtcgccgtgctctcatgcatcgatggcgacatctgcccgtcttgcattcacctcacaagccaccaccatgtcaactgagggctcttgagccaccgctgtcaccgctgccacctccgcaaggtgtcattcaattctgccaccaccgagcatgatttcggtagcaccacctatgtggtggacataggcgaaccttaaccctagcttcggcgagtcgctgcaatggatagctttgtgaccttctcccgctgtcgccgatgttggatcctcctagcggcgagtgggacagtggcggcattcgaggtgtacaatatctactaccacctggccatggtggcctggcgccaccgcctcgtgcagctggttggcataagctctctcagctcgtcctcgatgaccctaatgtcagccgagtcttcggcaaggtcggattccgcaatgaggacatcaagctcgccattctctgcccatgccgctcttcggctgcctacccatgtgtagctgtccgccgcttctcttcctttgcagcttcgccgccgcagacgacgctgttatcccttatcccaccgggaaccttgccggctcggggggagaagaattgtcgccgcatcgccaagatcctctcccgtggtcgcaaccccatgctcgtcatcacgggtgatgcgagagaaatagaaggactgacaagtggatcccatattttttttaatttttttgaccattgtaccttacaaatcggacccacttctatttcaactcctttgatgactgagctgccacgtcgggacacttagaccaaggcaatttgccacgtcagcaaaacatctttcgaaactatccaaggagtcaatttccaccggtttttaaaattgtgggtggtgttattctagttttgtggttcagggatgcgatttaaccagggtaaagagatgcaggatgcgaaatagacttattcctagttgttacttccacgtagattcggcccatcctcatacccatgcgctctggatgtaggcaggaatgtaagtacgtaacaacatatacacaaagtgttggaaatatagtcatatatcggtatattttaatccaaaatattaagacaataatcatgacatgaataatgtgaggtgatctagtgataaaattaaacataaccaggagcatgcttaagataaaataagcatcatcatcatgtagagaacgcaataacattgcgactaacagaagtaacaaaaacagagatagcggtagaatgttatacactatgaaattccatccctggattgtgaggtagaattgcctccgttggtgttgtcgatcggtgcaccagctccggctcccggtgcgccagctcccgctccaggtgcgccatctccagaagacatgatgcaaatgaaccgacgacgaacagaggaagaagagcagtcgtgcggaagcactccccaaaaacttgatcacccgcctacccggtgcagatctcaggcgaggtgtggtttcggagggcttgctcgttccgatctctcatgtgcgcaagcgatcagaaccggggaagcagaagcagcacaagcggtgcaaggaggaagaaccagcaatcggagagaaagcgtagagatctgatcgggggtctctgtttcctaatagcgcaggagaggaatccgcccgttgccgcagtaacgacgcgatcaatgcgtattgaattgcctgcccgttacagaggcaatctcgcggggttggattccggtccattgcaaaaggatcgagagagagacagagagagatgcagacacaacgcaacgcctcggcctccccacgccctcgggccggccggctcggctcggcgcgcgcgcgcgcttgtggctttccgatccccacctcaaccggtcaacagggagcctccaataactccctatttaagttgagatactccacttttaattcccagtgtggtattattatctttaacatttattatgggcccttgagattttaatagaaaaatcgggcctagcccatttattctaacacaaagtaagtaacaacatccatgaagtgacctgcatgagaaaatactcctctctcttgccactcttttttatttctgccctcctctctctgtcactaagtcctctccccactcctctcccctctcccctcactctcggtgagtgagggccacggcggctatcccatcatgggtctggcagagggagcgagaggctgacggaggagtggccgagcgcagatccagcggcggccggctgccgtccccagccctgatccagtggcgacggccctcccccacgcggatccggtggcggccctccccgcgcggatccggtgcccctctcccttccgcgcggatccgtcggtggcggcgacgcaatgaggacgacgatgacggcgacggtgatgggaggacaagcacgccgacgccaaccggagggcgaggacaaggatggcgttgacaatgagaggattctagggttagcgtatcggggtagtggggtagttttcaattttcagaatttatatatattttttcatgattttttccttttctcatgtggtcagcttaagcgcccatatgggaaaatccgattttcgtagacctttgagcacaggtgggccgcccatccacatgcaaaagtcgattttagccgcataaaaaaaaaccaaatctgtagtagtggttactcatattgaccaaaggcaagcccagcataattcaagagtattaaaatgaatatctaatattttttataaaagaaatagatatatatcgtatgtgatgcgtatgtgtatgaaaaacaaataaaatggacgtcatattcaaaccaagaagtcatcatattcaacacataattaaatatatatgctatataaatatcatttttttaatgaaggtactgccaggtctttacccaacagtttgatttatgctatataaatatcattactactatatgataatatacatgccaactattaggtttttggctgtaacttttctttctacttctctacattttgaataacagtttgattttatgctatataaatatcattactactatatgataatatacatgccaactattaggtttttggctgtaacttttctttctacttctctacattttgaatatacaaccttaaaattctagattcacccctaatattaaccagttacaaccatttcacattttgttagagtgcgcagcccagtggtgggccacccaagtcacattgggcctgttcctccacaagcccaaccgaaaccacaactagacctacacaatccaaaagactagtctgatgggtgagaaccgccccccaccttttgagtcgtgctcccccatcataaattaccgatgtgggactaaacccaacaatctctcccgtcacatcaacccatgtgacccgatgaagactccatgtgacccatggaaattgttccgggttccaaacctagggcttgtgggtctgcatgtgacccaaggaaattgttcagggttccaaaccttgggctctaatactacttgttagaacccaacaatctcccccgtcacatcaacccatgtgagtatgtgacccatggaaattgtttcgggttccaaaccttgggctttgataccacttgttagagtgcgcagcccgacctaccaactgtgagccacccaggtcacattgggcctgctccaccacaagtccaaccggagccacaactttaggtcctgagcctacacaacccaaaagactagtctgacgggtgaggaccgctcccacattttaagtcgtgctcccccatcatcaattaccgatgtgagactaaacccaacacatttaatttctcatctctccttaatcctaaattaaacatcagaaattcagaaatgtttgcatttcatgacaaagagagtaagtatatattaagaacacaaacttaattcctacgaataactagtgaaagtttatctttgttcctatgaataacacaaacttatctttttatcatgaaaacacgttgttttagatatagatatagtcgcgctagcttcttaattcaactttgagtaccacaatactccctccatactcacaaaggaagtcgtttaggacaatgtttaagtcaaaccttgggaatataaatcatgaataactctcaagttgttgagtttgaaaatgtaaaaattatatgaatatatttgtcttgaaaaatactttcataaaagtatacatatatcacttttcaataaatatttttatagaaacaagaagttaaagttgtgttttggagaccgtgtcgctgtcctaaacgacttcctttacgagtatggagggagtatctgacagttggacacttggaatattaataaatataggattcgcggagctattaacacaactgcatcgatctctctgatattgcagttagcaaggaattggaccacacgttcaaatattaaagtgtgcattgcatatatattagccaatgatcacctagaactttggagaatgtatggctagttcgttggtgttcatattgtacttgcgtaatctcttcgctctgcatgtgcgtgtcgttgactagtgaggtgtgatatatcccagctagaagacacactaattattaacttaagcacaccattcccatgggtctaatttcttttgccaagttcaactacttgactagccggccgtgcatcaatatgcatgcacaccactacgtactgatcgtatgatccaactatagcgtgcaaggatcggggcaagagacgatgcaaacattaggtgaactattttaatccctcgaacagatgattccttgtttgttgaaaaaatcatactgatagttatgaacaaatctttaaatctttaataatattcatacaacaaaaatgtaacaatctatagaataggcataaactgaactcacgcattaagaaaataaaaagataaagacaacatataaataatactagtattttttttctcaatgtgttgtcaagtttgaacttgtttttcttgagcatgcaattaaacttgagagaaaaaagagaacggatattctctctagggattagaatatgttcctacaaacatagggcaattcgaacttaagccctacgtttgcctctctttgatccattaaagaaaaaaaatcaaaattctgaatatacaagagggctaattaagaaataccctcaagtggtaaagtattttttcccttgtgaggggatatccctaaattctcgaatgcatttaaataattatgaaacaatttgataacacagatcaatatgtgatatatcatttcataaatatacaaaatcaaaattgatatatacaagttgaaacaaaagatcgaataatccaataaagaacatgcactaataatttgttttttttatcaaattttatatgtcgtatttaaacttacatgtgtatgaagtatatatcacatattaatctattattttttttagaatttaactatttgaatgatatgtgagaaactaaggaactagtatgggtttacgacagatgggtccaccgacctacatcgtccctgtacttcacttattttgtgccaaatgtgcttggatcaacctgtcaaaagcctgaccacactttaaaatactatctttgtgtgcctatatcaagtagccctttgaatcgcacgaatgaaaaacggaaaaatacagcattctgataggaacgtaggtgtaaatcagatgattgcaaaacgcggaaaaacacaggaatggtcgtttgattggaccccaaaaaaaacacatgaatcggatgagaaagataaactcaaggaaaatttttcaagagattgaagctcttgccagtggcggaccctctcttgtggcatgctgtggcactggccatagctatgccatgcaaggattgaagagtatttatgcatttggccattagcatgttgatttatgtgctgattaattggttatttgatttgataaaagtttgtttaattcaggatgtagggatttcgtagaactgccttatgtctgaaaagaagactaacacaacccgtaaaaaataagtatgctgctttagtaaatttccactagtttattgcttttttccttgagcagaattattgattggactgaccatccaaaggtctggccataaacagagcacatatgtaaaatggacgcacactcttgtgaaaattatttcactcgtgaaatttacattacaaatttaggactattgtcgttaacgttttatttagtgtgtcgtatattcaatgagtgcaatttgcagtatagttcgtgtaaaaaaaattataaacaaacgtagtcctatcatattgatccgccatagctaaaatttggtgttggttccgccactggctcttgctatgttttctctaaaatctccattggattgcctatgttatagatatcgtaaaacatatgataggatttaatcatttgttttgaaagccttcatagaaaatttttctatagaattgaaatccttcgaaaccgctatgttttttctacaaatcaaaagcgaagatacgttttcacaggggaggttatgttggcgtttttctcccttcaattgtagaaacttcaaacaaagttagggcgttaattaaccgtgccaatgccggtcagcgactgctcctactagcagttgcaccaacgtatatactgggtccaggtatatttgagctaagctggcggtataataataacaaacatagttagagaaagctatcgtataaacttacagatatctccacatgggagccgtgcagccagctaggtaattaatctgcagaaagcactaattaatcctagcatatcatctcgcatgatcatcgatgcatgcatagagatatctcaaggcacacgtactccactaatccactctataaatagcgaagcacgtaccacgaatccctcagctcgtaccagtcgtcgtcctaagcaagaagaagctaagctagctagctgtgatcggagaggtatacagtgatcagtttgattgtgaatttgtgatcgccatggctgcagcttcgtctactacgactcgtttttgccttctccttgcgctcgtcctgccgatgatttcctccgccgccgccggcgacgacgcgctgccgctgcccatgacaccgtcgtactaccgcaagtcgtgcccaacactcgaggccatcgtgcgcggcaccatgctcagtgccatcaaagccgagcgccggatgggcgcctccatcctccgcctcttcttccacgactgcttcgtccaggtagatgatcctagctaagcttcatttcttcctgctcattgggcggatgatctatggagatcttgaagcaatgcaagctcacattgcttgtgattgatcagggttgcgatgcatcgattcttctcgacgacgtgccgtcgaaggggttcgtcggcgagaagaccgcggggcccaacaccaactccatccgcggctacgaggtcatcgacaagatcaaggccaacgtcgaggccgcctgccccggcgtcgtctcctgcgccgacatcctcgccctcgccgcccgcgaaggcgtcaacctggtatgtacgtgtttggttaccgcgtttggttaccgatggtgatttcggggccggtttcgtaacaacatttctgcactgcacacgcaatgcaatgcagctcggcgggccgagctgggaggtgccgctggggcggcgcgactcgacgacggcgagcaagagcgaggcggacagcgacctgccggggccgtcgtccagcctcgccgacctcgtcgcggcgttcggcaagaagggcctggcgccgcgcgacatgacggcgctctccggcgcgcacaccatcggctacgcccagtgccagttcttccgcggccacatctacaacgacaccaacgtcgacccgctgttcgccgccgagcgccgccgccgctgccccgccgcgtccggctccggcgactccaacctggcgccgctcgacgacatgacggcgctcgccttcgacaacgcctactaccgcgacctggtcggccgccgcggcctgctccactccgaccaggagctcttcaacggcggctcgcaggacgagcgggtgaagaagtacagcaccgacccggacctcttcgccggcgacttcgtggcggcgatgataaagatggggaagatatgcccgctcaccggagcagccggccagatcaggaagaactgcagggtggtcaacagcagctgagctagcaagatgatgatcacctactatttcttgattacttttcacagttttttacggcgtacggttatttcaacttaactcatttctgtaataagttcgtttgttttaatctccgaacttcttgtcacggtatttgtaatttaatttgtttatttgtacctctgagcttgttgcagtatttgtcgtttaatttgttcgtttgtaactctgagcttgttgtgatattaattatcaagcaaaatcggaaccattttacatttcaagaaaaggaaagaaagcaggaggtatttttatcacctaggtgatgtgatttaaatagttaaataaaaatgtgaaacaaattgacaaaatatcacttgaagatatgtccaagtgtaatcaaatctattatctatctatctatcttctattatattatattatattatattatatactaaaagtccatgaaacttcctacaaacgctctcaagtcgccacgtggcgctctaataaaatagagaaaatcctagaaattctaagaaaaagcaaaacatctatcctttgattttcacttaaattagtgagtccaatattatacaccgttagataaaatcgatcttaaaacaaactaaataccatgagccccacctatcctcctcccgcgcatgggcaggtggagtatataagtacctacatggtagtacgtacgcttccttccttttttttttccttttttcttctttttaccatatatatatatatatatatatatatatatatatatatatatatatatatatatataatggatatattttttaaataatcatgattttataaacaaagaatctaccatcacataacttaaaccggtgtactctttactttgcactattattttcaaataatgcactgttttaaaataaaatttacacaataatatcgtgtacctatcaaattaataatatctatattaactaatttatacgtgcacttaaactgatggccccattatataaatcatcggatctattttttattacattggcctattattctcaagtaatgcactatttcaaaataaggtttacaccattatattgtgtacccattaaattaacaatttaaaatctatattaactaatttacacttaccctataactggtggacctattattataatcatcggatcaattgtttgctaataaataaagcgtctgaaattctctttttgcctgctgcacaatgcacgcctgcacctttgcctttcgcacgtgtgacaaagcgtagtgtctgagacatctaagatgatcacaaccgctgtagcgctaccgctttgccacatatcaaatcatatatggagataattaattttgttaataacatgaaaagaaaattaaatgtgtgatgcagcgagagaataattaagcactatgggttgtgtttttctcaacactaattagctctgtttaagttgaaaccgagagttgattacataataattataattataatgtatttatgttatgtcgtatttggatttcgtactatttgttcgtacaggtgaaaggaatcattatgttataaatgtgagcgcaatattgatgaatatcaatagaactcttactacgacaagggtgataaagggagtttaaggccctctcttttttcccaattccatttttggatttttgtttgcacgctttccaagtttctaaatggtgtcttctttaaacaacattctaatttttttagaagtcaattcattcgtttataccctcaaatagctatcacataaattatataattcatcaatttcatcctaaaccttaagtactacattttttttcatgcaagtcatggtgatcagtaaattggtgatcaacggatcatcaaagttgtaagataaatatgtaagagttactctgaacaattgtaaataggtgtcaaaattaatttctattaattagacatctaaaggtgtcaaaattaattgctagccacaaaattaatttctctctacgtgtatataaacatggacgaagttggaacaaatattaccatatgtcccatacatatatattgcgcagttaatattctaattacatgtgttaagtcatttaaaattccttaaaatgctctcaagctgccacgtggtgctctaataaattagggcaaatattagaaattctaaggaaaaaaaatcaaagtatctattacttgattttcacttaaatcggtaggtccaatattataaaccgttagattaaattgatcttagaacaaactaaatactacgaggtcccacctcggcataggtacgcacctacgtgcgtgggtacgtacgcttcccctccctttttttcatttttctctttcttctttttttcccatgcatatgcttccctccctttattactatatcatgcgccttcatgagacgatttaatcaaaagaattttgagtatcttgcactcgcatttttcatttgcagccatactacacgtacgatatatatatagatggactgtatgataattaaccagcaatggtttcttatttagtcgagaaaaaaaaacatgattcaaaagtcgtaagtacttaatccatctcctactcaaaagttgtgaatggttttttaagataccttaagaaaaatagaacccttaaattattactccctccgtcacctaatataaaggattttgatattttgcttgtattgtttgaccattcgtcttattaaaaaaatttggaattattatttattttatttgtggcttactttattatccaaagtactttaagcacaacttttcgttttttataattgaacacttttttttgaataagacgagtggtcaaacagtgtaagcaaaatatcaaaatcccttatattaggggacggagggagtataaaataacattatccaaactttagtttgctaaagtttgccctgaatctatgagacaaaatttctaaataaacaataatcttacctttcaataatataatataagtgcccgcgcatacacgcgggccatcttcctagtttacttaattagctttgcatgtttgtaactttgtatatggacttctagcatcacattgacgtggcacttatgtagcagtttgagtaaaaaaataaatggaacaaaaataaaaactaaaaaaactaacaaaatatacgggacccatacgtcaaccaaaaaaaatagtggaacccacgtgttagtgggtcccactacctcacctcagcctcttctcctctctttctcttctaggcctccatcctccatccccgccttcatcctctagcgctccggcggtggtagcatcccacgacggcggcgtcgaagcgggtgaccgccggccacctgtggcttgcgggctccaagaacgccagcggcggcaagaggaagagagaggactgcagcgaggacggggggagaggagtggcgtttcagtgggcggtgggagaggaggggcatgcggtgggcggcaggagtggagcggccactctccttccctccagatctccgcctccttgctccggctccaccgccgccggcgacaggacccgccgcgccgccaacgcttctgcgtggaggaggaccgaccgcccccgccccttgtcccagcgcatccatcctcgccgtgcggaggaaatgcggaagaggtcacccggtttgacaactacgtcgcgcgcgacgggcccttgccgactcctcctgcagctcctaggccagctgcgtgaactgcacctcagcttccgccaagccacgagcacatgcccccgtcacggaggccgctgacaatgacgactcggccgcctcccctctcaccccactctcctcctgcacccattagatccgcccgatcaccaggagtgtggccgccttggaggcacaatgggcgacggagagaggggcggcgaccatcggggagaagggcgacgaccagcgggaaggagcgaggcgacagtcacaatgtcactgacctcaaccgccacggggagttctagggacctccgctcccgcctcaccgccgcggggaggctaagcatcgaacccacggcaaccacgcgcatttgggtcccctcccggctatgatggatctgagagccagtcaccgttggatcccctcctgtggcgtcttgtccagtcgccatcggatctcctcccgccgtcgttgagttccccttttcggaggccgacatcaccattccctccctctgcataactgcttcccccacgtctcctgcaggtggtggtcttcattacggtggaagaggagcggcgaccttgtttccctttgagcggcgccagtgaagccacccgccggccttctccctctccacgtgtgctcgccagcagacgagggagctcgaggagggaggaaggatgaccgggcaggagagggaagaaggaggcgtcgtcgccgtcgtccgtggagaaggaggcgttgacaggagaggagggtaatatgtgggtcccatgaattcttttatgttttatctgactgatatgtaggcctcacatgttttttaatttttaatttttatattttacttccagtgccacattgccgccacgtagaacaaggaccaagtcaaattagctacagaagcgtcatgtcagctaagaccatcatctaaactgtcgagggaccttgtttgccctggttttgttagttgggggactgattgtatctggttttttggtggaaggacgaaaatcagactaggcgacaatgagggacctcaagtgaacttattcctttggttctgaacaattgggcttgtagttatgggcctagtcccagcatgagccatgcatgggccttctatctccgaggactgtccaagaatacaactgtaaactagcttcatggctagaccgggtaaaaaaacagaagtttcacggtgtgggacacctccatcacatctctatatatgtatcttccacaaactctaatgccgcttattataaaacatgcaccaaaattgaaatcgtaaaccatacacgaaggagggtcatagaagattcaaaagtgacgatgacctcgaatcacgatatttgataatttagttcaaccgtagtctatatccttaagacactgattacagataatccctccctcatccaacataactagtatggtggcccgcgcagattatgcggctagcatattattatattttctctcatataatagtatatatgttttcttatggtattattcaaatatattaaaatgataacataattttaaattttgcaataactttataaaactactaatgtgtaatattcatattgtattttatatacatattagttattaattatttttaatatcaaatttaagttatttgtaaattacatatattcctatatggactctagactcgtcttttaatatttcttatttttttaattccgaactttctgtaaattgtatttttatatagactctatgctcttcttccaatattatttacttttattctgaatttttattatttctaattgtatttctatgtggactctaaactcatctttcaatatattctttaattattaatttcgaatttcagttacttctaaattgtattcctatattgactttaaactcttcttcccatgtttttcttaatttcgaattttagttatttgtaaattgtatttttatacggactctaaactctacttttaattttattatgtttattccaagttttagttagttttaaattcctatatggtttctatactctacttctaatattccttatttttttaattctgaatttctatttttattattaattgtatttctatatgactctatactctacttctaatattccttatttttaattccaaatttctattatttcctaattgtatttctatatggactctatactctacttctaatattccttatttttaattccgaattttagttatttcctaattgtatttatatatggagtctagtctcctcttctaatattccttattttttaatttcgaatttcaactatttataaattgtatttctatgtggagtctagtctcctcttctaatattccttattctttaattccgaatttcagctatttctaaattgtatttctatatggactctgctttttctttttctccgattaatgtgagaggctatttctaaattgtatttctatatggactctgttttttctttttctccgattaatgtgagaatttataggccatgagagcgaacgtggaggactggaggctcctttttctattcctttaataatataatagatagattacaagatatcaaaaatcctcgatcaacaacgccgctaagaagtcgttcgagagaacctaggagagagatgtaaataactttatcctaacacaaatacactaatacctagtaaaactctaaatcctactaatttataatcaactactttgtacaaatatttgatacatactctaatattatggctaagtttgatttagattattgagcaaattattgtcatggattaactactcaataatagtaaattgataaaataaatattgaaagaaaccaactcaacaaatactactccacccaaaaacatattttcttttgtaaatttagacaagtacagtgagtagcttaaaaataatttaatagaacatttttaataaaatacattttttgacgtgtgaattagtaaataatttttttaataatccaatgaataagttaaaatgaacgtggccgtcagggcgtaagtcgtagtcatccatgataaaaactagttcgacctagcgtgcaacccttgttctcctaggctgtgtttggaggtgggtgttgggaacccatatcccatacacggaaaacggagcggtccattaacgcgtgattgattaaatgttagcttttttttttgaaaatggatcaatatgatttttttaaacaacttttgtatagaaacttttttaaaaaacaaaccgtttagcaatttgaaaagcgtacacacggaaaacgagagaggagggttgggaacttgctcttgcaaacacacccctaatctcttgggaaatatgaaaggtgtgaaaccagagaatcttttgaaacaagaagctatcccccgtggatcttgttgtgaaaattaaggaatcaagatatcttggacactggcgggaaccaaacgtctaactgagatgatgccatagaaggccgctttatccgtaaatatctccttgtttttattttacctataaataacactcctatactcaatgaatggacacgttgtctttcgttaaaaaaaatctggtgtgcaactgggaattaggaattagcctgtcatttccagccaaatcggtagcatcgtttaatgacaaaaattgacctgaccgtcagaatcagtaactatgtgctaatttattaaatcacgtacagcttttcacagaccaaagccctcctgaacttttctaacgaggaaaagtaatagacctaattaactactagtggtgtaatttaattatactgtgctgtagttaagttttcctttccatcatgtcatgacgtgtgtgatttttactctggtttactggctactgctgtcatattatatcactatcgtattgtcataccttgatgcggtgtatcttccagaaaagaagaaattagatgatcacttcgacgacaagcttcgtcttgatcttttctttttggaggaaaaaagagagcaagttttgtcttgctgatccaatcaacatcggaatcacgaaagttatttctactccaatccatagtacaagataccgcagcaagtccggggaaaaaaaaacaacggtggcagagatgtagggatgaaagcaatgattcattacaaggttaacaccataaataaaaggcagtagcaaaaaaaaaaaaaaaccaccatcacacaccaacaacatctatacaaaactcagaaaaatactagcatcggaccgatcaccgctaaatgcgaccggctgccactagaccaacaaaaaaaagccacaaaccgaaccggccaaaaccaaaatctgacagcaagcactgcactcaactctaggtgagagagaagatggaaccgctctcccccacaaggcctgccaacatcaccaatttgcattaggtagggcgttgccgtaagaagacaaacatttagagagagcacacacaagctgcctaagagaggtttttgaggggggacctcctgacgacgtcttcaagtagaaaaacgacgatgatcaccaactcctcccgctaccgccgccgccgccacccttgccagccccagattcgggcgcacccacgccggatccgtgggctccaccactgcctctgtccaggcccatgccgtccccgccaccgccggtgctgtcgtgtcgtcgccatcattggcactaaggctgctgcacagggagacgacttcccttgatggagggccaaatcctgatagggagcattggatctggccagaggggcacgagatctagcggctccaagctgccatgccgcctatactccacgctctctgccccaccaccagcgcctcctccttcgcctagcctcctaggtcggacaacgttgtgtcgcccctagccgtgaaccgttgccttgctccgaggcgccggtcggtcctctccgctcgctgccgaaatggcaccaccgaccttcacctgagtccacccacgccggatctggagaggaggaagttgtgagccccgttgccgccgtcctggcgagccaccagcttttgccgacacttcgctcgagcagcagcgagggaaggggtgagaggatgttgggttgcggcggtggctagggttgccgtagccttagccgccctctctgggaggagacgcgggggcattggaaaaagtctgttagcccaaccatagttttcaattttctttggggtcgaaatacaagcccccaagatgattcgcaaatttcacagaattagataaaactgagtttgggagatctctgaattttgagcaaataaattcgaggaaaattcaaagaaattgtgaaccctatccatcggcgaaggtcctgcagtatccatgcatgcctggtctgtatatagaccctatctaatagttacttccccgtcataaaatacaacaatttttaaccttaaaattttatgttaaaaatataataatttcttcatctacattttcttttcaaacaaccacaacattattcccgcatttaaattttctactcatctcattttctcaaccaattacaaccttaccccatttaattgtaccaatttcttgacacgtacccgtgtccaaactttttatattttagaacaaatataatataaaattagaaattagtcttagtatagccccaagttgagtatagcttcaccgctaactgcttatcggaagctctttagctcttcaaaaattagaccgtagttaaattgtctgaaccgtaaatctcccctcttcggcttctgccccgactagagacatgcaaaccgatcggcgatcgaagcaattaccaccacatcttccaaacaccaatgcaactacgcaagttggccaagcagcgaggcaactagccaagtagcgcatggacacacgcagcataggatggtcgcatgtaaacactgctctttttctttaaaggtggggacgtggggtgtactctgaatgacggcagagaacaaaggacaagagatcacaagcaagtgtttttccaaagtgaatgaccactgtgctagtcaacatgtactccatatatactatccgtgttttaaaatataataacttaatactaacttacaatataacactatgaatctagacatatcattttcatgtaaagatgtgtttggttggaaagatgtccctagataggtgatagcaatccaacttttgaaggtgtttgattggtgaacaagggtagctataggacggttcgaagaggaaatattctaaaatacgttgaatgagtgcatccggccaaattaaccgaatgaggatattaattttgatcattagtaattaattggcgacaattattttttttaattagtaataacttttcaaaattaatgtcaaggagatataattagtatagtttatggtgaaactaataataattaacatatgttattattacttactagtttattattttcctcctatccgttctataaaaatttggatagccatatcaactcaccaaataaaaattggaccatatatcccaaaaaatatgaattgttatatcctacctaatcttaaccatgaacaaaacacaccataaatttatgatactgggttctatgtctatttattacaatatgataatattattttttttgcgatgtatatgataatagtatatattttgagcagaaagaaagtacttcctctgtttcatattataagactttctagcattgcccacattcatatatatgttaatgaatctagacatatatgtgtgtctatattcattaatatctatatgaatgtaagtaatactagaaagtcttataatctgaaacggaggtgggactagataatatcacgcataggaatgggggccaccggccggattcctgaggaggaagggcacaaggcgcaacgagacggacgcggcacaggagcgacgagcaggacatgcgcccttcgtcgtccttcctctctctgtctctcgttgacgacaggtcggaatatcggagcaggtacgtacgtaaggtggcgtttttgttttgcccgttaattagcgtggttgacgcggcacggacagtctccggctccggccaagcgcaaacgaacagtcagtatgtacgacgatacgatcgacgagctgtacatgtttccaaaccgccagcgatggcgacagggacgacgaaatttctgcagataatatgcagctagctgctgtgcctgtgtacgtcgtcgtccgggcagtacatgtgcgagtgcgagccatagtagctccagatatgcgtgctgatgtgtgtcaaaccagtggcgcctcgggacaggtggtgctcccagtctttccatgcgggcgaaaaggacttttgcccgaccgcatgcaaaaagaaaaaatcgcgaaaaaaataaaattcaaaaaaaaaggaaaccctagctggccggccgctcccgccggccagctgcccagttgcgccgccgcccgcccacgcctccagatctgggcggcctgaggcccgccgccgccgaccacgtcgccgcccacatcgtcatcgaccgctcccgccgccggtcgccctggttccgccgccggccacccccgctgccgcccgccacccccacccccgccgcctccagatccaggcagccccgccgcctccagatccgctgcggcccgccacccctgccacctccagattcaggcgggaggaggtccgccgccaccgaccatgtcgccgaccactcccgccgctagattcgggcgggaggatacgcccatcgcccgcgtcgccgcccgtatcgccgccatcgtggaaggcccgaggtcatcgaggctgcccactcgccggatccgctgcccactcgcagctcccgccgccgtcaaggaaggctcgaggtcgccgactcgccgacgccgcccactcgctgaggctgcctactcgccagatccgccgcccccgctgcgcgccggccgtcgccgtagccgcagccactccctagggcggcggatccggtcctcccgagggcggcgccgccggatccgccgcccgccgacgccatcgccgcccggtggcactctcggagagggagagggagaggagaaaagaaagagaggagaggagagagagagggggagggtaaaaaatagaggagagagagacgatgagttaaaaattttgaagtggtgggagggaaaagagagtggagagagatttggggtcgtatttttgcatacatagattttcgcatgcggctccttaagtggaccgcatgcgaaaatagttattaaaaattaatttaaaaatatgagaacttcgaatcaaattttatgatattaaatcaactcatataaaaaggttgccaaaaacaaagttgtagaactcgttgagatctaccaattttcttttggtcatttcttcatccaaatttgattggactatataaaatttgaactttataatataagatattcaaataattttttcacatagtaaatgatttcaaatagaaaagttgtcaacaacaaagttgtataacttatcaagatctacgacttttgtattggtcatttttttatatgactttgtttgaacagtttgaatttgaatttcaaaatatgacaacttcaaacaacattttaaaatacaaaatgatttcaactgaaaaagtcatcaataacaaagtggtataactcatcaagatctatatcttttattttggtcatttttacatccaacaaagtgatttgtaacattgttcacaaaatgtacatatcttatatagttgaagattatctatcttatataatttggggcttactctacagtgttttccttaaaaacaataaaatataaaaccacgttgtcaataattgagatatgtctagtggttgtagcacatgaaacaataattttgtttcaatttcctagtggagttgtgtgttgcaaataagccattgtgcaaacatagggaagacaatttcttgtgttttattcttataagagaaaatactacaccatgtacagtatatcatgtggtttccagttccttgatttagacatctaggtttgtgcgtgtggttggttcctggtgaaattaagaagatatatatcgatcaccatctcatcagtttgtctccatagcgcccatcgcatttgccatgcaagtcagggcaacaaatctcgatccactgattaattgaacacggtcgtagtagactacttcgtcgaaattatgagaaagcaaagcagcttatacaatacacaagtcgtacttgctgcctgtgccgtcgctaataggcaagtgcactctgctttttgtatagtcagcttttcacatatacaaaggcaagctgtacgtgtatcgacatcttcaattcctgttacaagaaagtccaaagtatatattcgaggttaagcatatattgtgtgttaactaatcttgatacgccggtgagaatcggatcaagtctgcatgggcatgacgccgttttgaccatcttttttgcgcacgaaccaagaaggtcgtgttagcttattttaagatcgatcgataggattaactgcttcggcattttctatgagcttatgttttttcctttaaaaaaagtaacatgcccttacattaggttcatattattaggaaatgtgttggatgtcgataattggataaagaataaatcatataaatttttttacctaaccgtttttatcggggaattttcttttttatgtgagaatgcatgttgtgcgcgagggaggaggacagacaactccgcttggaagtatactacctctaggttgataatacttaatgtttttggataagtctgatgccaaacttttaaatctgattttaatcatggataacttttaaaatatagagataatatgtatagattaatcttaaaatatatatttatgatattttgtgcatatattataatagaaaaatagtgatccaaattattttggcgactgtccccttatccaaaacgataaagtagtatgtctacatcagcgtgatattataattaatagtatgttagggtgtgaatctttcgtttttatttatttaagttttagttgaattggttaatacataagtaacttactatctccgtcccgaaataattgtaattatagattatttagaatatattaagagctaagaagaaaacgtatcttatacacgtaagttttcacttctacaaaaccatgcacatcagttaatagatattactgaaaatttcagaaaaaaaattgaacataatgtaaagtcttgtcgtcaaattcatcgtacacatagagagggaaaagtaacttgcgttataacgtgtgcactcgaagcttgtatccacagcatatgctatattataaaacatttgtaaatttatgacgtcaaacaaagtttgactgtgaggtatagtttggtgataattaaaaatttgagaatcagtacccaagtagtacaaaaggacaactaccctgttctaactgccctccatttcaaccgattagacccaggaccgtaaagcaggaaaaccatgttgttgggtaatttgctggactgataaagaaagctgcaaatggcatcctccccaggtgtagctataatgtaacctctcaatcagcattcctgtctagctatccttttcctccccggaaaccgcaacatactactccagtctcacttttaagtgtagtcaaaagcttttttcaccatttgaccttccattttatttaagaaattataaaaaataaaaaataataataagtcaagtatttattatctaataataataaaaaaattctaatcataaaaatattttaaataagacagatggtcaatcgtcgaacaaaacgggagactacacttaaaatatgagacgggagagtactcaacaaaactaacgcgacaacagtagcttttgactgcgttttcaacaaaccactcaagcaaccagagaagaggatcaaaaaccacactgatactaatcatgatcgatttcttcctcgtgttggctacaatgatgctgcatgctgtacttccaacttgtctccatttctcgttgatgccaaaatggcaggctttgtgcaatcaaaacgaaaccctctcatgatcaaagtacaccacaacaacactctagctactggctactcctatcactacgcaaaagttgttgtaccaaccaataaagcgatcgatctcctactaccagtagtccagcagcaacgaagcacaagacaagaaattactcctccacccaacgaaagcattatttattttactgaccaaaagatcacctcacctctcccggctggctccgatcgaatcccctcctggattttgatacatcgattggattggatatgatgcagctatccacgatggagaaactgtgcgtgttctctcgcgtgcaccgtcatcgtcgtctccatcatggcgtctcgccggcgcctccagcgggaggaggaggcgccggcctgatgtccttgagcacccccactacctgctgcatcgaaggcctcttctccggcgagtgcgccgtgcagaggaaccccacctgcaggcactccaccatctcccgctccgccaccgtcatcgttgtctttgctgctccactggtgccgccctcctcctcttcctctcttagcctcgcgtcgacgatgttgaggctctttcggttccggatcacacctcgggcccagctcaccgtcgaatcatcccatctcacctgtcctgtcacaagctcgaacaccagcacgccaaagctgtacacgtcactctctggggtcagctctccattgttactatccacggggtgtatgtagtccgatatcctaggctctaggtcatcgtcgaggaggatgttggttgggaccagattgccgtgcacaattggacgtcccgatgatcctgcccatccctggtgcaagaacgcgagccctcgtgcgattcctagtatgatgtggtaccgggtaggccaatcatctatggatttcttgtcctgctccgtggtgtcccacatatcagcaccggtttcttccatgtccatactacttgccggtagctcgtggagccaccggtagaggttgcccttctctatgtactcgtataggaggagtttctcctttcctgctcaaatgatgcaaaatttgaatttcaaattcatgaaaccaaggagttcaattgttattctatccatactttatataatatattgcgatgtaaaaatgtgtgaatttcaaaggattttcgttgaaacatactgttcaaatccacataaattaaattgttttacgtgaaagcaaaggaatttaattgttattctattcgtagttatatactataatacaatgtaaaaaccgaatgattttttagcaaaagaatagaagaagtgcagttagatcagctatcagttttcagcatgaagccattttcaaatttgtttttgccactctatcatacactgaaagatatgcttttggaattttgtctagactacacattctagtcaaagaacaagacaaattttagtggaaaacatgagtattatttctcaagtcattatctaaaaacaaattagttatattttttttcaagcaaattggctgacctgcaatgcaatagccaaggagcggaagaatgtttgggtgcctgagccttgcaagttcccggagcccggcagccgccgccgcgacgtcgccgtcgtcgccgccgaccccggccaccgcgccatcgacgacgcgcacgacgacgtgcaggtcccccgggagcacggcgcggtacgcggcgccgctgcggccgccgacgtcggcgagctgcgactcgcgcccgaaccccgacgtcgccgcggcgaggtcggccagcgtcagctccatcagcggccgctcgaccagcaccaccggcgcggtggccgccaccttcaccgcgcccacggcgacctcgtcgtcctcccacgccgccgccgccttcttccctctcttcctccggcggctgaagccacacgccacgcaccctgccagtgccatgaacgccaccgcggcggacacggccaccacgccgcagaccacgacgacgacgatgagaacgacacgcttgtgcttcttcccgccactggacggcgtcatcgtcgccggcgccggagccggagccgacgccggcgggttgtcctcgatcactagtgacgtcgcattgccggctctgaggaaggcggagcggccgaacttggtgacccaggtggagttcacgacgccggagaagttgttatccgatatgtccaagaactctacgccgtcgagcggtggtaggtcgtcggggaacttcccggccatcgagttctgcgacatgtcgagccgccgaacccgcgtcagccgccgcaacccctccggcacggcggcgatcctgttcccggacacgtcgagaaccaccaggccggcggcgagcccgtcgacgccgacgacggaggtgaacccgttgcgggacgcgttgagcgacgccatccgcgcgctcgccccgagccgcagcgcgccgccgagccggttgcgcgacacgtcgacggcccggagcagcggcgcgcgccagagcgcgccgccgccgaagccgtcgtcgccctcgagggagttcccggagaggtcgacggtgagcagcccggacaggttccccagcgccgcccacccgacgacgccggcgaggttccgcgacgagtacgcgagcctccgcacgggccggcacgacggccgccgcggcagggggaagttggcgacgttcttgaacgcggcggtgacgatgccggcgtcagggagcggcacggtgcagttggaggtgctgtttcgcgcggccgcaggcgccgtcgccgcggacgccgaggtggcggcgacggcgacggcgaggaggaggatggcgtggagcatgggcggcatgggcgtaggcggaggagggggggggggggagggatgtgtgtgtggtggagcagtgggcggagacgagggagacgacggcttaatcaattttaatcatggggacctgaccgcaacatggattactgtagcacacgcggttagtacactactatacttgggctggctacttgcttgcttagctgtggaggttagcgattaatctggcttaatcatgacgggttactaggctaattactatatgacatgggcctcttcagattccagcccacaaagtttgctggtggaggctccttcgaagagcacggtttttgcgacgattttgggccgaattcagcccatctaggtcagctatttgctctaggtgggccgcgaattatctggaccgtcgactgaattaagatccgtgaggaggcatccagaccatgggcttcatttagcccggattagtcctcctacgatcgaaccgcaaaccattttacatggagaatatttcttccaatacccactaagaaaaaaattcattttattctcgcgaactatttcattagatggcttaacccccccccccaccccaaaagtatttgtcggcttattttacaccccccccccaactatttaaaatggtttagtttgctccctaatgatatttctctctttttttctcttttttttctctatatataagcagggtttacttcttcggtttagccgatttgatcggaggtcaccgatacctcgaaatttcagtccgaaattttgaacaaaatttagttaaatttgagcaaatattaccaaaattcacaaaaaattaaaaaaaattgaaaaatttcggacgaaataatatcatatcggagcggtccaaaatttccaaacttgtatataagtcatattttgcaatgaaatttggtactattgatagatgcattataacttatctttgaatatttttacactttttagcaccatttatataggttcgaagcgatgagactgatttaaacattgaggttttcaagcaaagtcatggaaaaaactgaaaatattttgaaagttttggggagtaaaatgatttttttctagtaagtttgtaccggctcaatggtgtgccattcatactatctctttctataatgccactgaattttcaacaattttaatatgccattgagatggatagttttccataatacccaaaacatccttatagatctataagattgagaattaatttattctattagaagtttcaaaaacttatggttttcttaacctccttacacaacattgaagtttttatgtttcatgatgtcattcatgttttctacaagatatcttttgtggcatatgagaaaggaatcgcttacaacaaattaaagatatataatagcacaaaactattttgtgtagcatattaaagatgatttacattaaaaaggaacaacagcaaaagtattaacatataacaaacaaataatgttttataaaataaatagtaacgcaaaaattgtgaaacttatacaaacttctatgacgtgctaagaggctagacaaaagttttcaaaactttttgaatcatgtagtggggtcaatcaattgtcaactcttatatatactagtaatatgcatgtgccaacgctacgacttaatggcatattatagaaatgaatgataaacttgaagcatattatagaaagaaacaaagtcgatggtaaatcattaaactaatgaaactaaatggcatggagtagatctgttttataagacatttacaggaatcattctcaagaaaattcccacgttttgaaggaggtatgactcctgtggagtggtaggttaaatctataccatgtgttgcagttcacaaaaagacaaattttgtagtaacacaaaattgggagaaatttggtcttgttgtatggtgagctaggagcgagggcaggaagtttcaaattttgaatttaaataagagaattactaacattctactcaaatttgacatactcccccaaccatcctctcgcggtctcactcccaactataaatcatttagtaagggacattgctatctctttttctcaaatcttaatctatactaaacaatctaacaagaaaactattttgagacggagggaaaaatactttttctgcagaaaataaagagatgattcgccattgtatatatagagttgctcataagacacaaccagattctttttctccgtagattgaattcttatagtctcacatgttctttttaagtgaataaggggccatataatctatgttatgaagtatttttcagatttttttttctaactatgtggacaacacacataaaacatactaggtccttaacctttccctgagtttagttacacatttctttcacttgctagctctgacagtactagctaggggtcagcaggctcaatccacgagcttggaatttctctacccatgtcgacaaaagactacaagaagacacacaaaatccatccccaagagagaactgagaaggcatccaaactagtactacacacaaaagtaaaagattagcaacaagctgcaaattaagctaccccatcactactacctaatcctgacatcctgtggatgattcccctgatcaaagttgaccttgtcccctccctaggcccatccgtatggttttaaaaatattccagattaatcatcttgttgctcacaggctagccagaatcatgcatcacattggatggccaattaattaattattttctctccttcctttctaatgcgtctatagggagattactaaagaagaaattaaaactttgtagtgtcccgggtagaaatgtttcgctctcgtcacatgacacgacatgccgtcccaaattctcattcagctatggtcatcagagattccggaaaagtaattatttggacgctgggaaagggatggcatggggaaaaaatgaaactttttggtgtgcgttttctataggtctagctagggttcttgtctggtcttataagctactactagctaggtcatggattttctagagcagctcatttctgtcgccaaactatacgttccatatgggtttgtttgtcacaactccacctctcctggagctaaagctttgccaaacagtttcagtttcagctccacctaaaataggagtggaggtaggtggagccgggtttaagctgctctataactctactccaaaccaaactcctggagctaaatttaggagttagagctttaccaaaggtgatggtaaattggttatactgtttcgtatcgccctgtctgcaaataaaacactacctcaataaaaccctctctgtttatttcattgggcttgttttaccatcttgcattagaggtaccgagttaaaaaaaatatcattaagtttttttttttcatatgagtgtccaaatctaacagcatagtagtcacaaatggagagtctggcacgcgaattattattagttaaacttccgtataagtagaaatggaatggtggttttttatatatgttgattagtcccagtggatattgctggtcaacaacttgattgacacggacaaacgtaaatacctgctacacttaaatcgatttgatttggaatgagtcggagctcagtgagatccttatcaaaggaatcattccaagttgtatatcgcgactaaacggtatatgaagtgttttaaagtaattggacaatttcacctaacatctgctgatgaatcgtcctcacggtgattcattttagcgattcgaggaccaaagacatgctcatggtttcattattccgatctgaattgaaggttgttcagagatcgagatccatgattaatttataaattcatgtgcatataaatatatatagtatcaactgttgggatggagttgttgagcttgaactaaaatctagagagaaggctgatctaactccatagacaattaattctacggaaattaaaataaaacctaaacatatatgtatatgtatatgtatatataaggaaatgttaattaattgcattcatgcaatgatatgtaatgtaaatatatatagtctgtgctatgtgtacatattatattttgaaggtatatatagaaacctggtactacagtgctggagcacttgcggggcatgcagggcattgtatgccaacaactccagaatatgccgcatgcatgtatgtacttaattaattaagaaaaataatttaatcgaaataatggttagctatattagcaaacagttgctagcttggcctcttaatttcatcgtttgttcgttgtattatcagtcacaaccaaaatttatttttttttattttaagttttttattatagtttattttccagtacagcagtactgccatttaatccactaagaacataaatgtaaaaaaaatattgtcttttcattgcttattttaattttttagtgacttggccgtagatatatcaaacatcagattgatctctacatgtgtatagtgtaaattcatcataagttgtcgttcaggggaaatgtttttctttccatcttctactggttaatttggcatttagctagtggattttcctacgcaattttgcacgatgcaagattttaagtagaattggatttccatataattcttagtttctatttccatatataagtacaattgcaataatttgtatacattttttttaaaaaaaagacttctatcacatagatacaattgtcgtcatttgtatactaatacatttgaaaaaagtttcatacgtactatagatacggttgcattttgtatacatctatatatatatcaatcaatctagctacatcatatataatctagatccaccacaaccacctggtgcaatttttttctccggttaaaacggtaatttataaacctccgtagtgaacgtggttgttcttttttttttttaccttgctctgaatataatatacagtagatacaataagcaaggctgttctttttttttctttagcatttctcgtttagtttattttttaactaaaaacatcactgctagctatctagacttcttttctcacccctttaatcaatttaagtccatgcgcaacgtaaatatgcctttattaatttgcttgttgcttgcccaagtactgaccaacagtttctccgcgtagagctagaaaagacagcagaaacgactaactaatcatcagaaggtgatgagctgagataacactttacactacacatgcggccatgcatatgtgtgtaatgatgcaacaattaaatcgatcgagctcgtttgttgtgttgtcacacaaatcagcagcaaattaaacttttttttttcaaatttccacctatgtaggagaaagcagatagggcatatgcaaatcgatcccatgaattccgtgacgacgcaaccacattctgccggcccattcgtgtgatcgttcgtccccttttaatttcgatcggaaagcacacactacgcatatgaggaggaagcaagaggcccccttttttgcatgcgtccccctgaaccataaacaaccaaccaatttgaccaaaaggggtctggctgctgtttaggtttaattttgatgtttactagttgattacccatggttggaatgtatgatggataagttggatctacagaataacagatggttggttgttgagtgtgatttatatatatacatgcagaattatatccaggcctacatatatatcttttgcccggtcccaaccgtggttcttttataaatttcgggtactctgagcatgatttacagtggagtgattttaaagtcaggaggtaccgagaggtactatattttatcgtgtaaaatttggtatctctcagtacctgttatactagaagctaggtaatttgtactagaaattggtacctcttggtacactgtaaaatttaatttctctttacagtaagaaacgaggaggacctatagtttgcccgaccgcatcgggatgcactcatgtgtaatccttatccatggtttccctgtgtgctatgcttgtttcgtatttaaatctatggtattaattgttgactttatttgttcaagcttttaaagctctgcccttcaaattaatagctctcaatatttagtttgaagacaaagaaaccatatgtacatattttccttttaaaaaaatataagcacttttacaatattacaattttgtttgatgttattgttatattctaaaagaaaaacagaggtcaaagttacacaccaaaacctaataaagtatatggaggtaataaatgttttttttaatattgcgcacacatctaaatattgtttaaaggagacatttatgcaaactatatattgtggtgtaaccagacatccacctgagctaggacagtgactagaagagaacatctgcagtctgagagtatatacgtacgtaggatatatatatgttcatatccggaatgaaataaatacacatggacctgtcaaacatttgttcctttttagctagctaatagctgtttaaacaagcctgtcaaagggagcatgcagatgcacaggcacaggcaggcagaggtcaaccaccaaacgctttgtttttgtgtcacggagtgcagctcagatccacacgacaagggggtcagtgtcccaagcgagaaaactattagggcaaagaaatgcttttggaatccagccagattggcagattgggtcacatgaactaaccagaggctagctcagctgctcagctcagctcacactcactcgtgcatggatgcatgcaaaacctaataggaaagcaaaaaaaaccaagaaaaggatctcactgctgctatgtaaagtatgcttccaccatttagtccatggtcaccttcaccaaaagctcttgtctttagctactaagttaattaatttgtagcctttttggctgttgtaatctgctttaacctgatgtgtagtttccctctctctagctagcttagcttctctctctgtttgtgtgtgtgtatatatatgtgtgtgtgtcctttgcataggtgtgcataccaaacacaaggacagggtcaggattatattgaggatagagatataatttctagcttggaacagtgtttcaaaaccagtcaatgtaggaggagaatgcttgtccaattccctcttattttattaacacatcattagccagtagctagcttgcttatgcttcttccccatctctccaccagtactactacatatcattgcttccctcatttcatccccttcttccttcccctttcctagctattccacctgcacgcgcgtacgattccgatccagccatggcagtgtagatcgaaagagatcaagtagaagatttggtaagatgcttgagaggtagatagctacctagagaaggctgatcagcatcagcctgagagagatgaaggagaaggaagtgctagttgagattgttgaggatgatgagctgaagagatcgattggtagaaatcagctggacctcaacgaggaagttatggatgtcgagagcgaggagggagaagtcggcgatgatgaagatgacgaagatgaggaggatgacgacgacgacgatgatggtggtagcaccaccgatgttgccggaagcaggagctccagcaacaacagcagcaccaataacgtttcagagagcaaattgaagggcgacaaggatagcggtggcggcaggttggaggggatcaacggcggagagcagagggtgccatcggtgcggcagtacaaccggtcgaagctgcctcggctccggtggacaccggacctccacatggcctttgtccatgccgttgagaggctcggtggccaagagagtaagtagcctaaaaacttcatcttctttttcttttgaaacgagcaacaccagatagtgcgatgtttcatattaacatagcagaaactgctagaacttttatcacatggtatatatgtatgtgtgtagctgcctgcatctcttgcaattatggattatttgcttttcttctgagtcctaaactccaatttcttgttgtgcttttattgttttctcaccgatgatttgcatgtgttgatgtaggagcaactcctaagttggtgcttcagatgatgaatgttagggggctcagcattgctcatgtaaaaagccacttgcaggtaaatgatgctctaaagtgctctagaatttctacaagttaaagagctagattcttaattcgtagtcgatatctacctcgtatattcgcaattccattaattctcatggattaattagcatgcatggattccaagtttccaactaatttttgatccattaattttgtttcagatgtatagaagcaagaagttggatcacgagggtcgccagatcagaggagccatcgcctcaggtttaataactttcaatcatcatgcatgcacacaccaattctctccacatctctgcacatcaatttatttcattactctcatctttttctcaagaggttgtacattttttttcatgattaattttttgcttctcatgtggttttgcagtgttctctccaatggatttccatctgatgagaggcgatcgacgcttccacgacatgctcctccagcgagccgccgcgctctcctcctccaggcaggagcacggcggtttcttctcctcgagaagcggcggcggcggcggcggcctaccgccggaggccagccggctgtacggactcctccaacaccggcagtctccggcgatagcgacgatgcaaacattagacttcaagaacagcagtttcaggtaatcaaagtgccttagctaagttcgtatcttctctgccgagacgtacgaaaccctaatttctgcgagtgtgtgtggtctctgaatctgaaggaaccaagagtggtcgttcagcttcaaccaccagcggaaggagacgatgaatccgtcgtcgtcgtcgtcgaccaccgcggcgatcaggcggtggccttcagccgccggcgcggtcgccgtcgtcgccggcgagcgacaaagactagcggagagattcggctactacaccgggaacggtggcgcgtcgtcgacgtctctgccgctcatcacgagggccgccatggcggcgccgccgccgatgtttgcggcggccgtggcgccgccgggacgtgatcaccatcgtcttccgtttggatggcacgccggcggcggcggcggcggcggcggtaataagaacaggtcgtcgtcggatcccgtggtgatcgatgaagccctagattcccgccgcctcgaggttcgtgcatgccccccattcgtatttatccatgcatatcatcttatcattctccacgtcgacgaacgctgtactccgtttattccaaaatatagcagtctaaaaataaattagacatttcataaatttcatatactcaatactcaatgttcaatttattattattttggaacagagaatgacaagcatcgagtcatttctgaatctctatctgacacgcgcgcccatttgacaacgtaaactaactaactttttttttatcacgacattgcatgtgtggttcagcatcagcagaagcatgtagaacaaccaaggatgactccgacgacgacgaccacaccggccggcaagcggccaccggagtggtcaccaccggacctgcagctcaccttgtctccgacgaccgcccccgcggccgcagacggcggcggggccaagaggagcaagacgtcaacgacgacgacgaacaccaccgccgccatttcaggcgagcaagaagcagagaagaatatggatcgctgcaagaacaagctgtccatctcgctctcgctctcgccgccggcagcagcagcagcagcggcgaacttctcctccatggatttgtccatggagcagcagaagcagaagcaggaaaagacaacaataggaagcagtgaggaggaggccggtgatctggggcagagtactttggatctgaccatgtcgatcagggcattggagtgagatctttcaagtactttgtcccccccccccccccccaccacacacacccacaccccaagtgccttccaaaaactgcacactgcaccatgcaaaatgacagcaataagattgttaattaattttaacctcttgtccatctctctacccagtagttttatctcagtacatagatatatatgtcatggtcatgcttgcttaatgcttggttattgtcttctagggagttagtctgcatgcatgcctctctctagatatgtatgcatgcatgatcaaatcacttagcttgttcttttgtgacagcatctttgggaaactaaaccatcacaagagatcataagtatcagtgtgcagaagttccagttaatctaatgtgccattaatttaatatgtattaaattgtttactttttcgatctgtttatctataagttgtgcgatttttcttagttgctagtcacctagactggcgcaatgtgtgtagcctaagcttacacaattagtagctcaaactttagtataaattcactacaccatttcttttacttttattttcctggataaattacatgcacttttgtgcctaatttagtactacttgtttttatcgttttgcagtcgtaagtatgcccaccaggcaccagtgtataattttcaggtttgacactttagaaattattccctccgtgttgaaacattttttagcgtttgtagacatacaatgttatgacatatatattcttttttataagtgtctgtagacatttctcacgataaaaagataagtggtagatgaatagctaatgatcaatcactcaattcaggaaaaatgatgtataaaggccatcaaaccttcaaaaattattccagttaacacttctgagaaagcctctacaaaatatttaaaccattgtcacttctgagaaaccattgtgcctccttcctctctagctgatacttttctgttttgagcagcttttgcttttccttcgaatttgggtagacatgtgggtgtgttagcgcttcttgctagagcaatggctttgtactatttaatgggctgattttaggtccaatattaatatattgaacatttatttcatattttaacatatatttcatattaatcaacaccatatcaaaaattcgtatgcaaaaattttacatgtcgaaatgtttgtatgtaaagtttatttatataaagtttttatacataaagtttatacgtgtaaagtttctgtaaaaaaaaattatgtgtataaagtttttaagtagattttttttaattatgtactagaaagtttctaagtggaattttttattcatctaggaatattaccgagtagattttataatttggtaaacagtgaacttttttatctattccgagaagaaattctgatgtaattacacaagatgctaatctataagtgctattcagatataactatgcggtaatggagcatcacatgcaagcgtaccaaaaataaaaagatccatagggggagcgcccgttggttggcctgctcaaagatgtgggtgtgctggacggttcaggacatggatgtcgatgatcttgcgggctgcgagaatgtgatcgatcgtgtactaggaggcctacaaatgtgttaaacatgagaaataagtctattttgcctctgttgctcctgatttaatcgcctcccttgatgaggacatcctagctacacacgtacatcaacatgacgtaaacaagggtgataatttacgtcgtacatcacatgatgaaaataaagatagcgtaaaccaagttgaaagattatttctcagcaagaatgatcatgcattccattgtccaattacgcgcattcgtactaggaaaatacaacaagagatgaactcactctttgctcaacttaacccaaatattagtgagaattttatactatctaaatgctctactttgtattgctaaggtttacaaccgaagacatgatcactacaccaagaaagatgagttacatcgaggacgacaagggttacgccgagtaggaatcaactcatatactaccagcagctatttacgccaacgagaagataatttacgctgcaacaagtcaacttccaaggcttgtgtagcctagccaatcaaagagatggggtgcatggcatacatggttggaaagaggaccaagtctagtttccaatgcaataaaccccaccttgatagcattttccaatgaggagttggactattttactgaaggctacgtgagagctgaagggttgtgcacgaacccgagaaaactctgagcattctcatttatgttagccttgaccaccagaacatgacttcttatgttcacgctaagctaggagggttgttcctagtgcaaatacccctccattatatccacaagagaacttttattcaattgaaaatctcatgtatgagagattgctaaagacttcataagtgccttacctcctttgtaattgtgagtttcttagaacttgtgagaaggctcctttggtgccccctaattcgtgcttttggctttcggatctcttgtgtagattaatcctagattatggttttgtgattgctcggtttgacgggtcatagtccaggaggctttagatcattctcaccatcaccacttggttgcatccaactttggcacgtgtaaaactagttatcattttgctgctcgcaaacaagttatcctcgaggtcacggtttatgccggtgccacttgcttcaatcctactgtcgtgaagatcaagccacccctcacgagtgagttaatttgcatccactacaggagttctgggcttctgtgacgattacattatgatgataacagcctgtttcctgtcactgcctgcctgcagtgacgaaatggctgtcatcacaaaaggtgagtcactaaccagcttctgtgaccaccagaggacatcgtcattgatacaatgacgaaagttctcctgccattgatgaatgacgagacaaattcgtcataacaaattgaacccacgcgtatgatgacatgtgatgttgcagatgacaaggcaggtgatgtggcaaatgacgtgccaattcacattcggcccatatagcatgggcttttttattttcaattacaatcagcccaattggcccatatattttttgacccaactacaaatttgcttttacatttttttcattatagcccaatagtacaattctagcccatactatgggctagcccaattaaaaagcaatcacaaaatataaaccataaccatttgcataattatattataatcacattccagccataattaattttccagcccatacaaaagcaagttccagaatatagtttccaacatgttccatacaaaagcacagaacatgaatacaaaatgatccatccaccattgaactacacaagtcccagccgactaccaaagttactacaggtagtgccaagttccggcaccaaaaaattccacctagcagccactactaagtctcagcctgcatcttgccaatagccagcaaaaaaattccaccaagcacccactacacttctggactgcatcctgcagcagccaacaactagtgccaaaaaatcctatgttccagcaaccaacgaaaaaaaaaactccggccaccaaaagcgccaacttgcaagcaaccagcagctagcaccaagttctagcagcaacatacaccatacaatagcagccacatacaccaccaagttcaactacactaacaccagccatcaaattccaagctcatccacctcattcctgccatcaaaaggtgcatgttttcagttgctggtgaataaaaagtccattttgtttggacttggaggcaaacaaatgaataaacagtgtttaaagagtaataatccagcaagtaaattgagtaataagtatcttgatatgcctcttttccggcaagtccaaacaaatggatcttttctactcacaactaaatccaaacaaatggctcttttgcagctaataatccagaaaaaatagagtatctagatcaattaatcaaatgactcttttccagtcacactaaacaatatctaatttcacagtaacaacaactataaacaatccagcaagtaaattgaaataggcagagtaataggcaattttgatacacaccatgaacaaaaaattcagccaccaatgaaacagtacctgaggatacaagtgcacaagagacaagttaaagctttgtacctgagcatacaactagcttagggaggactgatctgaccctgtccaaatgctatcatttgtcgaaggaggctctgagtatctgctgccatcttcctcaggctctcaatctcctcagcttgtttttccactttcgcatcagattcttgtgcctgcgccttcaatctttcaagctcctcctgaaagtactgcagactctagcttctttgcatctagttcagcttgtatctctttcatcacattggttgtcttggcagcgggctgctgaattccgacgttgcgcaaaaatgtgtttgacttcggcaacactttggaaacagcttcaatagaagtcttagcttgctgcccatcttctactgatggtgaagtgagggcttcccaggtatgcatatcctcctagcaatcaaagtagtttcagttttgcattattatataaataaaggttcattgcataaggtatttaataaaagaaggaaagaagaggtaatagcttagtacttactatagctttcttcacaggttcactaaaacctttagttttgctacaatgcaactccttaaagagatcaattgcagtgggctcactgtctttgtatttttcttgcttctgcaatgttgagagatggcatgagtaatggttatgttaaagtacatagataacacaaaaacatgtcctccagaacaagcattccagttgacattgagtctttttgttaaacattgacagtggttgccatgtataaacttaattgatgtcaccccaaataagtataagcatgacaagagcaatcaaaccaaattgatacagatttatggataaaacatgagcatatttttacgtggtcaaagtgtgagataatatgctactctccctactaaagctttaaatcatatagcattatgcagagccactatcaatatgcagatatatatctccactggatctgaacacctccatcaggaaacacaaaaactacatccaactagatgacatcatcattttttttcttaccacgacataggcatgtgcaatgtaagaccgagatccggtacgctgttgaaactgaactttttcacgattcagttggttttggcacatttgtcctgcacatgacacaattacatagcattagtaatagaaccactatgcatctgtcatttccatgcaacatcattttcatttgttttcgcaagtcactattacattaaaaatgcaaatagagctgatccaaacagagctataaactggactatggaataattattttgccacctgactatcaaatttatgttgatgtatcttaggaagctatgtggtttaaaaaactcaggaagattacatgaattatcttatagtcaatctgaaaactactataataaatctagaattatcagatgtagctggcatgttccaattcctactgacagattcaaaagatctcaaatgtacctcatatccaatatgtgtatatccagccaaacatgactttgtgctcgaatccaagtaataagctcacacaaaatgaaatctgctaaacagtaccttgtgctctgggcttgaccacatatctaccaattttgtccattgctcatcggtcatacacttcaagggcgatgtagtcctcacttgattagcaggtaccccatcaaagtacttctttttgagcctatacctcatatggcgtgttccacaccttaggatgtcttccattgcagctattacaggatcgctgtggatatcaatggagaattttccctactcatcaaatagcataacattaagcttcaacaaaagtagaaagtagaaaggaactacaataattatatgtaatgttcgatatggctaatgtattatttcttaaaggtgcacctagttgcaccttgggcatctagttttatttaaatgtgcatctatttttacttatataatgctggcagcacatacagtagcattgattcaattagtggaacagagccttaccttcagtttgccctttaagttatcaagttgactactatcattcttgtagtctgtccaacttggatatattggtatatgctgcctgattatgatcccactctctgaggccagctttgcagtttgcataggagcctctggcctttttttcccttccttgacaatgattggtatcatggtccctaaacctttgcttatggaatcaatctctttgcccatgctcttcccccttgtctccacttgtatactgctagtgagggtgcctaacataaaacatttacaagtgtcaataaaaagatcctgcacttgatatgaatgaagcatagcacatataaggacaaaagaacaagaatccaagttacttgccttgttgagtagtgctcaatcccattggctctagttctgtacttaaagtgaggttgcctaacaaaatacattattaaacatatgttaataagaagatcccttcacttaatatgagtgcagcataccacacatattgacaataaaataacagtagggtagccacttgccttgtccagtattgttggtgtcaccctgattctggtttgcagacaaatcaggttcgagtccaacctctgtggcttcaatcaggctagtggtggacacttgtttcatagccctttgcctagtgcatctcattgtttcttctagattttcaagtgctagcactctcttagatgctcttcctgttccagttgtgacacaatcaccagtgatggccacatcttcccctagtaacaaagcctcacaaagcaaacaaagacatgtacaaataagttgcagaaacaaagtcatgaaaaacttccttaaatatccactgcgaataaatatgtcacagaatatcaatataaatgtaaaattcagaatgcaaactcaacatatctaagacctaatcttacgtctttgacaatagtttccaaaaaaattgcctaactatgccggagtccatataaggcaggggctaactaacaatatatttgtaccaactgtacacgtaagggatagagtactctcccgacagattaatcatatttttcatactctatgaccaaccattaagtttggattcagtgctatgaaccagctattggcacttaagcaatactgcaattgttcaacatgtttaaccaagtagatcaaagaattcatatgcaaaatataagtggcatctaaactacatcatacatgtattgaatctcactaaacacgcatagctcagtcaattagagatattgattagtagaagagtttagtactagagttggtacctttgactttttgccaacagctttcttctttgcaactgaactctggaatatttgtgctagtttacggatacccagctgattagcaaatcgattgttcctcatgatattccaagccctcgacgtgcttaagtccatgtcttcctcttctgcacatacattgcaattatatttagtgggtatgaaattagttagaaacctatagtccccctacaccaccagattgacaatttggaaaattttaaatcgagaaaccgaaaatcaccccacgcacagactcatctcccagcgcccacctcccaatccagggccgcccaatccaagcctcgaaaccctaaggaggatgagctgagaagtacctagcatctccatggcggccgcttcatctggaaggaccgaaggatggcgggaatgtgtgctgttgccaccaagcaccattgtcttgctcctaggagggaggcaaggggttgccgcaggatctggaaggacagaaggagggtggggaggcttgttcttgccgccgagcatcttcctcccaggcgccatcgtcttgctcctgggagggaagcaaaggggtggccggtttggaagccgagcaagatctgcaagaaggttgttcttgcccggcggctgtgcagatggagggagtgggaatgattctagggttagcttcagcttcacctatatatgtgtcacactcgagtgagtaaaagtcctaaattgacctcatttgggtatgccagttcaatagctggtatgggcataaatgacttttagcatcaaaaaaagtggcggggcaggcattttgatttcgcggtaacggaggcgcacacgggatgtgaaaatttggcctctttgattgcagcacataattttgttggataagattatagctaatcttataaaagtttataagatcttgtgttaacaaatctccaatataaaatcaactataattcttgagcttttttttacatatgttacatcctcaaaataaaaaaagttagggtttgagttttctttttttacattcgagtgccatttcttaaaacaggtgtaactttctcactgcagcattcattggcgtcggcggtagcagcgctaagaaattgtatttgcctactactccgaccttctatgttcatcggcgtcggtggcggcggcgctacgatcctgcaccaatcatgtggggatgttgtgcctcgagctagcacaagaaagacggctctggccctggtagccagacggggcacgatgcacgacggtcgatggggaaggtgatgtgtctggcggtggcagccctgcgcttcgaaggggatttggttggtggtgggcatcagacgtatcagcgacgtatcgggtttgttttgattatatggaaatcacgaaattaatacgtatgtatcgggtttgttttattcctccttctcgattcctctttctgtttcctcacgcacgtgcccaagcggacggagagccggtgggtcgaggcgacagtcggcgcggcgactgcggaaggtgacgggggcagaggaggtggggccagcggttggcgcggccacgacgggcggtgcggcaatggagaagggcagcgaggcagtggggcacgcgagaaagccccatccatagtgatcggccacctccgcgcatcccccacccgtccttgcatacgccgtctcctcgcatcccccactcgtcctctcatcttccgcctcctttcgcatccacatctggggtggcatggctccctcaaagaaatcgattcaagcgcgccgacagttgcgcgacgctactggcaagttcagcggtcgcgtctctctgggaggggtgcgtggtgcctcgacatcggcgaaggaaggggcgcgccaggagctcaaaaaatttaagtaattattaattcttttcctatcatttgatttattgttaaatatatttttatgtaggcatataattttacatatttcataaaagtttttgaataagacgaacggtcaaacatgtgctaaaaagtcaacggtgtcaaacatttcgaaacggagggagtatatgctaatttggaccttaatggtcagttatggtacctggtgttctggatgctgatgcattatatatctataatatatgtatgacttgtcagcaaatgtgtgatctcatgtacatttgttgaaaatcatattgctgctctcttttaatctgaatttcctctccacttaaaaattgctgtcagcagatatattcaaaggagtcccctcatacatatacttcagaaaagaacaaatgcacaaaaacacaaacatcaaatattcaaacaacatcatacacaacaatcaaatcctcagatcacaatttaaactgacagccatgttctaacagcaggttatggtgggacttagccatacacagatattttactcaaaatcactatattcaccatcatcatggattggcccttcattttcactgtcatattgtctcacagtttcgtcagcatcatcttcaaagccattttcttcaacttccaattccctttccctctggatctgatcaactagggaagcctgaacacaaataccatcttcataattgctaggctgctcgttgattgaagctctctcaagatctgcaacctgaaaactagtattttcttgctcatcatcttggtatgacaattcatgctctgcctgggccggcaggtcatcattttcttcttcgggcacattccacaagtgcctatgggaaaatttttgaacaactttccaaggctcaccatgcttgttatcttctaagtagaaaacctttgttgcttgtgtggcaaagatgaaaggatcatccttgtaccagcaactgccatggctgacacttttgaaatggccatcatctttaatcctagacttcttgctacaagtgtcaaaccaattacactgaaataaaactactgtcctttgactgttcgaatcagagttgtactgcaactgaattatttctttcaactgaccatacaagtctatatctcctccattatgtgagccctcaaccatgacaccactgttttgtgtttttctacttctctcacggtccaaggtgtgatagcgaacaccattaacaagacatcctgaaaataaatgaactctaagatgtggttcacttgccaatgcatataggtcttcattgacttcttctccatgcacaaattttctggttgcaagctgtaccaatatattcagagaaaaaaattcagagaataaggtcagaaccaaaactgattgcaaacagtcctgtatcctgcaaaatgaccaataaattcaactaggagctaaatgacttacgtgtttattaaaccatcctgcaaattccttagcaagagccctatcaacatcaacattgccagcactctccaactctgtcctgcatatcctgcaagtattgcgcactgtcatgtgaggtgtaaaaaattacagcatagggaaaaaattgattgctccaataaaagacatactctataaatggctcgacctccggagtattgttgaggatataccaaagcatcttgtcataatccttctcattgtacgtcatcctcgatgcaccaagaagagtgactccatgctggaaaatagataagccaccttctctcaaaactacacgctctctattcctgccctcacaattgtgtcgtgtgtcaacatcatcaaaatacctagagcaagcattcaagcactcgtttgcgacatatgcctctgcaatggacccctcgggtcttgccatgttcctcacaaaacgcttcaaagtaagcaacctacgctcaactgggtacatccatccatactgaaccggacccctaaggattgcgtcatcgattaaatgaatggaaaagtgtaccatgacatcaaaaaaaaggtggaaaaattttctcaagcttgcacaatattattgggatttcacttctcattttgttcaagacatctaccttcaatgtcttagcacatatttgctgaaaaaagttacctaattcagcaattgcttcataaatttccttatccaggattcctcggaggcttacaggcaatatcctctgcagaaggatatgataatcatgcgttttcaatgcctgtactttgcattcatcagcagaaatacaccttgataggctggaggcatatccatctgggaatttcacattctttataaaagcacaaaaagcaagcttctgggttttagtcatcgtatatgaagcgtgtgggagagtgtacgaattcccatcaggcttcaagtgtaaatttttcctcacacccatatcttccaaatcaagccttgcattaattgagtcctttgacttccctgtaatgtcgagaaatgtcccgagaagggcctcacatatatttttctcgatatgcattacatcaagattgtgacgtaacttcaaatttgaccaatatggcaaatcccacaaactcgcccttcgcttccagcattgaccttcttcttgtctctttctctttttgttatcaggatggttcccaggtttaacatgtgaaaccctcgccaattgctcattcagctcatccatagtaaattcctcaggctgctcacgttcttcggtctgtccatcgaaaaaaaattttgtcctccaaacatggtcccgtgggagaaaacgtcgatggccaatataacaaatcttgttccttaatcttctagagcaaggatttttgtcacaacgaacacaggcatagtaacctgtagtaactctgcctgaaagtgtgctcagtgctggatagtcatgaatgcaccatataactgtagcatgaagatcaaatgatttcttagtcagagcatcataggtagggacacctttccaaagatctaacaactcatcaatcaggggttgcaagaagagatccatatcctttcctgggcttgtcggaccaggaatgagtaggcccatcatgaagttggattgctccatacattcccatggaggaaaattataaggaataaggaatactggccacatgctgaacgaggcgctcatcttcccaaatggattaaacccatcagtagcgaggtcaagttggacattccttgcatcttttgcaaaccagtcatatttcctatcaaaatccttccatgcctcgccatcagctggatggctaagttcattgtgcactggttttctcttcaacttgtgccattgtgcctgctctgaaagctttttggatgcaaacatcctttgcaaccttggaaccacaggaaaatgcctcaaaaccttgtttggaatttgctttcttgtatcttcatccttccatcttgaagcaccacatactgggcaattatccattttagccaactcctttctaaccaaaacacagttattcggacaaacatgtattgaatcatatccaagtcccaatgcacgaataactttcttcgcttcagcataagatgcaggaatagaacattttgggaattgtacacttaacaacttcaaaaaagcatcgaacgcaacattgcttattctataaaattacttgatgtgtagcaacttcaccacaaaagaaaatctggtatagggaccattagggtgtagttgctgtttcatctcttctaatatggttgcaaacttggactttgttgctggttcatggtcttcggctgtgtacaactcatgtaccatctcatggattcgatcatcatctgggtcatctttaggctcattcatctcagtttcaacattgcagccaatatcaccagcttcaacactgcagccaattatatcatccaatgcttctccatgatgtatccaattagtgtacgtgctagtcatcccataaatatataagtgagtctcaacttctcctttatgttgatgtaaccgattcaaacacttacgacatggacataatatctcctgactatcatccaaattagcagaaacaaagttcatgaactcagtgacccttctagatgttccttgctaaatagcctagtattcacccaacttctgtccatctgcgacacactgaaataaggcaataatcaaggaatcaagaactaaccaatcatcataacaaactgctattccttctagctttctatcactgaccatgactcactacagaacatagcattgaattttgattacctctgaagtcgaagaaatcaaatcgaagtcagccttcggagagaactggagcagtcaggctcgccggcaggccggctctgtgctcctacagctcgggaggttgtcgcggttgctggccatcgcgccgagcacgcgacgcgctggatctggcctagtgggcagcggccgaaagcgtggccacggggtagcgccgaccgacgagtagtgagcggagggctagcagctggcggagaccacgggctagaagctagcggagggcggcgctccggcgcctcgaccagggagctggcctcggcgcgctctgctttgctgctgccggctatggtgtggtgtgcggccacgggcaagggcgacgccaatttgcaatctcttttttttctcttcatccacacacaatctacaaatataaaataacaatcctaggtcacaaaaaacaattgtctcgactggttatcgaagtggatgtaaaactcctctagaattaagtcatgggttcgaacccaaagcttgcttcttttttatgttttcccccctttttatcctatataattctggtgcagcacttgttcatgggttcaaaacagtcaaaggtaaggcccatgtaatgcaggttcaaaccaacttatagccattttagttttttttttaagttttttcattcaatcataaaattaaacgccatatttctgattttttaagatgacttcaatctaaaatcctaaaatgagagactagaattgatatagagaagaagagtccacctaggacaaacgatttgtggtctagtagcaatgtagtataacaagattttttttgtttttaaaaaaatataatagttctatattttatgacgatatactattgtcatcgtgctatcgtcacagagcccatacagtatattgtgacgatgattatgacatagacacggtttggtcataaatagttgtcatcctgtgaacaatcgtcataaacagcctctgtttataacatatatgtgttctgtcatcaggtaatcgtcacagaagcccagatttgttgtagtgatcatccctcaaccataaacagggtataatgcattcccatcttcgaaagttgctgcaattagacttctttggtggctgagaaagttgttttttgttggcatgaccagttaaatatggctgactttgctgagtcagcaggtgggacccatatatcagtgacttcctcctcatctcatattctttctcacctcttccctctctctttctctttcctctcttccttctttcacctctctcactgtccatccgtcctgtagccactggccaagaccacgtcgcgtcactaccgccgtcccctctcctctcaccacccgccccccccatatccgcctcttctttacctgagccgctatttgctttgtgctttcccctcagccccactccaacccaccccacagctccatccacttatctcctcatcactatggatccgatattttgctatggcgccgttggcatctcgccccctcttgctagttgtggtggttgttggatgtggctgtcagaggtgtctcggtaatggtaacagaggatgagagaggatgttcatcgtgcaggtggatatggatgcattcccaacccacgcactcttgtacgaggcgatagtgacggtgacgtcgggtgtgggggggttgggggtggaggaggggagtggcgtgagggcggcccactgatccacatgtatctactccaccgtttctcacggctttttcgcacgaatgttgctggttgcatgccaccaccatcagctggcggaggctcccgtggtggcgacagtggtgctagagtgagttcggcatctcgccaccacccgctcattgtggctccttaggctgttgtcctccccgtcgtcagcactcctcgtagactccaactttggtgccaatcttgtcatcattatcatcgacactagcatctccctcacctaccgtagctcccacgaccacaggcttgatttagtcacgcttactcgtccccaaaccacattggagagcctttgctcgctaacaaaacacactggagagccgtcgcctcctccgacccgaaggaagctgccttcacccaagccatggacctccatcgcaagcgcctgcgtgtgcctcctttctattgccagtttgccggccccgcaatgaccattcccccctgcccaccatcaccgtggcactcgtttagctacggagggctccgccttgttgcatttgtgtgaggaagaagaggagcgaagaacagaagaggagagaagaattccttcctccaatccctaacttagcaagttaaccacggtcaacttaccacgtcaacaaaaactgcttcctgaaccaaagatggacgtcacactcggttttatgtttgagggaggcaattcaatcaaagatcaagagatgaggaaggcagaatagacttatagcaacagatgaaagcacacacattcaggcccatttaggcattgtcttcctcctcacaacgaactcacacgcggcggcggcccacggtctcaaatccctccccccgacgtgcgggccccacctgtcaccctctcccatccgtgcccaccgattcgcccgttccaatccgtttgccctggtcgctctctcgcatctcgcgcgcctcgtgagcgaaacgaaatccctaattaaaaccgcttaatccaatttaatcccctcgtctcccctctcctcctcctccctcctcactctctcccctcctctcccctcctcctccccccacctgcactaattaatcacgccacgagacgagatcccccttctccttcctcctcccaccgcccgcctcctcctcctcctcctcctcctccgccgccgccgccgcgcgcaggttgctatcggaggggagacgcgggaggcccccccctctcgtctccgcgccacccaggtcagccgccgcctcgccctctcgttctcttcatctctctcttcgcgtcctgtcgaatgctggtctctgcttgcgctcgcagcgtgggggccccgatccgggggggcaccgccgcggttggggcgtggggaaggaggaggaatggtggcgatggcgcgtccgcggggggcgttggtcaacgtgggggggcgagggttcgacgtcgcgtcgcgtcgacggagggtttgcttggattagggcagggcgagggcgcggatggggtggccatgctttgcgagggcgtcaacgctagttggtcaacccctcgatcgggttaggggttttaggttgcggcgggcggcagtcgagtggctgacttctaggttaatttttttttcctccgagaacacccagctttgctggatttaatattataaggaggagactggctctagtttattgatggatttcattggtcatggcccgtctgttacatcattgcttagcgtatgtcaccagcctaattggtctatttgagacgaaactagttagttttgagttttgacctgttcataaaggctatggtggcattttaacatttgctatatggcctcttccaccgaatgttggggtgataggtactatgattaatatgattaatggctggaacttggatttagagttttggcgccaaggggcttgataccaattttcaaacattggattagtgtacatgttcgtcaaacattgaagtgtgatcagatcttcaccttttatgtctctttcttatccttttgtttgaaatggaagttagtgtggagtttgacagtgactggagtctggtgtttgatagtgattgccttgaaaatcttagattgaagggagactggaaactttgaaattcaggctagtggatcccgctgtggttattgttgacatggaactgctgtagatatgtcatatcatgttcttgtttaagtgataatttgaatcgttgaaatggtgttaatagtgtgcttagtatacttatcggcttgtttccacagctcaccctatcatcatatcatgctgcatatactatattgctttttggtgaaagactgttctcaatgatgtttgtcactctgtgtaagtatgtttgaagtttgagctcagaacaacttttttattgttccactcctttgtaacaaactatttaaacttatacagtgtaagtatcgtgccgttgttactttttagtaccaaagtgtaggaatccaagtttttattacaaaaataagaaacaaatctgttgttcatattgtacaagtcaaatacaagaaccagtaatccatacagtggtggacccaagaaaattatgttgtgtgtgcatgcaagtctcacgcagaacacaacttaaataaagtgcatcactgtcatcaaactatgcatggcaagttatcattatgcaattagtacgcaaaaatgcaaataaggatttcaaatattgttcttaaacaaaagattcagcatttccatatattttatgaagaaaaacaggaagttgcaaccactgaatgcgagctgatcctaggaaaatttcatttgttttccctacccggcacccccttggtctgcccctgtccatagcaagaagccaaaaccaagaagatgttttacattaacttgttttggcacaaatttcaataagggtgtttctaccatgcgaaaaagcatggatagcaattgcttatgtgtgaacaaggatatatgatgtatctgtacaatatagctgttgatgtgatatttctaggaaaggtaatggaaatggttataacctataagcacctaagcgtgcgtgcgctattcaaccatgataatgtggagattatatctttcagctgggctagtggttggattcttctctggtcaagaaatatatgtatacagtattacagtctgtgttgttagtgtagctgcatggttgatgagtcgattttggttgtcataactgtgcacttagccacttactatgcccagcgaaatactcaacataataattgaatcacttttttgtgaatgagtgtagggctatattcttttactggactcatgatccttttttttattaatggcacttcaatgcagctggcgtttagaacgtaacatgtcattggcttttgactaaattctacttgctgttgaatatatactatctactgcagtttggcatcaatatgcagaagtcttctctattccattattgtgttctagttctagaataggtgctattgtataaattatatttacattagatcttttgagcttctgcattcctaaattataagtgatctcatgcttgattcaattggttgttttgctccattatgcaggttgaccttgtagaatgaatccataaaatgattctttatttcaacatatattggagatggatgatctgccggatgatcaaggacaatccgacgcacacccttcagatccaaattggtggtcctcacatgcggagcacaagctcggatcaatttctctgactaaacaggaaaggaattcgggttcgccaggatcttctcattgtggggaaggtgaccattcattatgggctgcccagacattatggtgtactgggtgtttatcaagtccaatacccaatggtttttattcaattattcctgtaagtgtgaatttcatacgaggcattgaattgttaaataaaaatataagtgactcatctgtacattttaattttaatcctcgttttaaaatttgtaggataagaaactgaaggagcgttttgacaccatcccgtctccagatgatctttattcccttggaatagagggattcaaagctgagataattcttgtggatttagagaaggataaaaaactatctgctataaagcagctatgtgcagcattggtaaaaggattgaaatcgaaccctgctgcaatgataaaaaagattgcagggttggtaagttcttcctaagattctctatgcaattgaagacaattgtgacatcttcactgctaaccttcagaataccacaagctgcaatcacttgacaattgctttgcaaatggtttacaaaatcttcttgcttgaaactattccattttattgtgctgcaaccttttgagtactacttgattcttttaagtatgtagtggattatatgttttcttgaaaatagaaattacaataactctattgatagcattgattatattctttttagttacttttattatacatttaaaaatttctaattgtttgtaggtttctgacttctataaacggccaaatccgcaactcagtcctgcaagaacttcctctgaggaaatttctcatttcatggaaaaccgtggagttcaattgctggggcaaattagacatggatcttgtaggcccagagcaatattattcaaagttcttgcagatgctgttggtatggattgtaagttgctggtggtaagatttattgccttctcattagtatgtctgaactttgtagtgggattcttcatgtacttgtgaaattccatataattacatcagtgtggcattttaatgtgtgtagggcattccgaatgaagaataccatgaatatgatgactcatccaaacatatgtctgttgtggttatgctgaaatctgtggagtttctagttgatcttatgcgttttcctggacaactagttccattctcatccaaggctataattacatcacatatatctgcagctggagagagtgactcagctgattatgattcttgtgattctcctcttgaacctaatagtcctctgtgttcccaacggtatgcttgtgtattccgttttaatgacatgtgtgtcttgtcatggttccttttggcgattttgccccttgacacatatctagtattattgtattggtataaaattcatacagttccagatgctatgtggtcctgaactatgtgtatcaaatttgaaccagagcctggggtcatccctaattgcagtgtctgcttaaacgcgatatccaaacatgtgaaaaatactatctccattcatgaagctatagcatgttgagtagagataatactggtcttttccatttctttaggtttatgatctacctccattttgttcttttttggtgtacagtagcatgtggagcatttactgcttgcaaatattgtaggtgttggacagcaactactgtatgttatgtggtgtttttcgtatatgaggagtgagatgagaagaagcaattaccaccaaattataatcgtattgtcgctaggattagatttcaaggattaattttccttttaaatttacacaaaagatttgcttgttaaagattttgttaggagtttgtctggcctgcttctttttatataggagtgaaggcacgattgaatagagcaagcagaagttagaatctaatctctccccctctctgtttcctatgttccaccacggcacctgggaagcgagggctctggcctcgctcttctcgctcttctgtcggtcgagcacagctaccactgaggcattcgggccctccccagatcctaacatcgtagctatgagagttccaatttatcaattgtacccatttaatactacctccgtcccaaaatataagaatttttgggttggacacgcttattaagtaagtaggtagaattaaagggggaagattgtgattggttgagaagatgaagtaggtggagaaactaaatgggggaatgttgtgattggttgagaagagaatgtaggtggagaagtttctatattttgggacacattttgaatgctaaaagttgctaatattttaggacggagagagtagaatttaattctattgctatagaatgttgacatatttgttaagatctttgtggtcttccaacttattttttatggcactattatctttagagtaaatttcacaaaactacacattttgtggtctaagttgcagaaaaccacacacactttgacacttggcacttaagtacatatattttggtagtgtagtttcacaaaaccacactatcagtgaatggattcacctgcgagatgacgtgattgtttcacctaggacaaggacatggcatcctattaccagccatcgcatgaaattaataggatgcaacgtcctcatcctagatggaacaactatgtcatctcacgggtgaatccattcatcgatagtgtggttttgtgaaactaaactaccaaaataaatgtacttaagtgctaagtgtcaaaatatgtgttgttttatgcaacttgaaccataaaacttgtagttttgtgaaatttactcttatgtttattactaaaactgaatcattatttgtgtgttcctctgttgactacagtttttacaacatttgtgtgctttaattttaggaaatcaaaatttttaattttttctgatgggccatattgccattttacgtgttttttttctttcagccaagagcaagatgacaacaataggtccttcaaagtaccatctctaagaaatatcatgcttaaatcgacaaactctatggagggtaaattgcgatggtgagtcataagatataacatatgctgctcggtaatgttattttatcttgttttcatgttttatttacttattgtgaagtacttatctatttattaatttcatgcttttatcagctcatcacacagtgaaccaaatgtggccaattccttctgtggtcgcagccggaggaaggttgtggaggaacatcaaagaactgctagctcaaggttcctattttcacccttctatctatttgcacgatatctgttgcatatttggccaaaaaagggggcccacttgtgtttctatcaatttttattcagatttcttgtttgccatggccattgctccatttctccaccctctggcccttaataaggataatagttatgcaaatttggaccattaatgaacatatctatatctggctacatgaaaattgggaagcatctggtggaaacatcaattaaataaaattgtggaaaccgctttacaaactatgtatagtcctaaaaaattcccaaaaccttaccataatatcacaccctgtaccaccacatattctcgaattatgaagtttcacccgtcaagtaacaggtgaacacccacaccctatatagagccttaaccacccttatcccttcaagtcttctgtcccatcacgcttcctcctccacacaactcgatctcgcccttcttcaagctctggcgagatctggatctccttccccctgtatctctcatgccgacttgagctccccagtcaccaccaactgagatctgtcgctgccgcccccctcccccccaccatccatccatcccatcttcaactccggcaccaccgacaaattataccctccggcaagatctgtctcttcgccgccaccaccagtccgttcttcaagctcagcaaaggtaacctctgcgcccctccttttccgtcctgcccctgcttcccaccactggtcgcaggtgctctccagcttgtccaccgtaagatgccgcccccctcgtgcccgatgctaaccctgctcaccaccctctcctagatcatagcgggtggcatcacaagtgcccctgccattcctgtaaacctgaatccccttctctctcctcatccccaacctgtcccagaatcctaaccctgtcctcaccgagccagctcaggaggggaggcggcatgcttgacttttccctttttggcacttccagttattagcaagtgatcgctagtttgctaattagggaagcttcattgcataaacccttatgtttcccatcttctatttgcacattctgttgcataattggcaaaaaaggggttttattgtgtttcttttgtttgtattctgaattcttgttttccatagccattactccaccctctggcctaaaatgtgcagtcaacttatgtggatgaaaatttgggaaacaatcaattcaataaaatcgtggaaactactccactgattatgtatagaagtttttttttatttaaaaaaggaaacattaccataatatcatatgcaggggagatgctataatacgatcatgtaaaatttcaagatcaaattcaaacatgagaattttcatttgctttgaagattcatattgatatagtttaagttgcatttctctcctttttgtagtccagagcacccattgtctagaacacggggacgctctatgcttggtgatagacagcatggagatggtgtagctgtctcaaggtacctcagtaagtttctcttttgtttaaatttgtttgaagtcatgaatcaagaaacaagcatattctgatctgtttatcccctctgatttgaaatttgaatgcaatgcatgaagcatcaagtgcagtatctatgatggtccaaatatgtcgagtaatgtgaaatacattaatagagtattaaagaatcctttgttctgcatgtagtcgctcgatgaacaattctggattaattaatattgggatcaatacttttaagagcgattacaaggacccaagggacaaatcagcttatatatgcttaaattcaaattttcaaaaacttaatgtggatccagtataagccgtggaagattgcttggttattttaaaacggaatggttccaatttataagttctaactgattcaactgttgttagttgtaattgtcagattccctagtttttttgagttcccagttgaaatttgtgctggcctgcgattctattcagaagaagcaaaacagtcattaatttagacccatctgaatggagttctttagacacgagggaatgaaatgccattacttttgatacttctcttattcgtggtatacatggtatctttcacatgtaggatttgaaatttgaacttcaaatataagctggtttctccttgatgttgcacttaaaggtaataccaccattaaaagtgtccagtgctgtcatggaaaacttatggaagatataatcagtgttctattatcttagcctcatatctttggaatacatgaaggatttaacaaagtacagtcaatacagtttctaatccagtacaactgttatcttcttgagttcttgacatgattttgtatgtgttgcttgattataggtcagatggcgcatcaacatctaatatgcgtagaggacggcgaagaagtataagttttacccctgaaattggtgacgatattgtgaggttggtaaacccgacctttaaccctgagcaatgatacaatgtggttaattgaattgtttattcatagttttgcccaataatacaacttaacaacaatagtaaaatccttgcttgcatctaaatactcaatggaagaaaatttcattttcaaagaaataatagaactataaaaattggttatttggacaatccaggtataatttatccatatcatgcaacctggtttataaatctttgtgagttttgttccatttagcgaagttgtgtgtatgcgaactgttttttgttccaagtaattatgtggttttagttctctcttttttttaacttgcatcctgtatttctggctttctgcattgaaccgtttgtgtttctttgctgtcaggactgataggaacttttacttgcttgtttacagcgcagttcgagcaatgagtgaaaggatgagagagaatcgcctttcaaggggacaaaatgatggtagtcctggacaattgaatgattcacaaaaaaatgtattgttttgcccctttttagttgattttgttgatatgctttgctgttcaattttcaataatctttatgtgacctgcttatggaggacagttgtatgctcattatccaatgcataaattttgttggaatggtttttgattatttagtctggtattcacatttcgtgattgattccatatgttatacaggaatcacctcatgatttcaatgacaatgaactacatgtaagaggaccagatgagcaagagggctcaagaaggcaagttagtaaccagaaggctgtgtcattaccttcatcgccccatcgattgcgcagtgatggttctggcctcagaggaccagccgagtttctgacagcagatctgatgtccacttggaataaggttttgcgatcttcaccatttctgaacaagcctttattgcctttcgaggaatggcatattgagttctcagagattactgttggcactcgagttgggataggcaagtacatggttcgctatctatattctgctacattcaggaagtccctgcattatgaaatacaccacttcgttagtttttatcttttattgaactttttagaaaatcataatgaatgatcaattatcccaatataaataaggatgttttaagttgaccttttagagtcaagaaacagcctcttggtagaatgtcattttaaaactgctaactcatctgaatgttttccagggttctttggagaagttttccgtggtatctggaatggaacagacgtagctataaaattattcctggagcaagatttaacaacggagaatatggaagatttctgcaacgagatctccatacttaggtattacatatagctttttgcaataacttccgttatctacaatattatgtcctaatgttattccctcttttttttttcccagccgtcttcgacaccccaatggtattgcctccacatacagtcctcattactgtagtttcattttccttttttttttgttttgattccattttctttgatgatcagattgttcttattgtttgaaatttaatataactagagatgttacctaagaatggttgtttggctttgaatttcagttatattattccttggtgcatgcatgaagcctcctcacttatccttagtcactgaatatatggaaatgggttcgttgtactatttaattcatgcaagtggccagaaaggtaagctcagttggcgaaggaggctaaaaatgcttcgtgacatatgtaggtgagcagatgacacatgctttactgatatttgttggcagttataattttcttgagtgtctagctcctgatacgtttctgtgaattcttgttgtcatgtctaacactgatctgattttttttccctgaaggggtcttatgtgcatgcaccgtttgaagatagttcaccgtgatctaaagagtgcaaattgccttgttaacaagcactgggcagtcaaattatgtgactttgggctctctcgagtgatgtcaaattctgcaatgaatgataattcatctgcaggaactccggagtggatggcccctgagcttattcgtaatgaaccatttacagagaagtgtgatatcttcagccttggagttatcatgtgggagctttgcactctgagtaggccttgggaaggaataccgtcagttcaggtaaccaccattattcatctctttgtacttttttcatttgaagtatacatctaacgggatatgctgtgtgcttcctcaaggtggtttataatgtggcgaatgaaggggcacggttggaaataccagatggacctctcggaagcctgatagctggtatgatttgagttatttcttactaaataaatgcccatgcgtttgcaatgggtaaacatgaaccttcttatatgtgataatatttttcagaaaaataaatgtcagtattttgttttcgttgaacacaccattcatacttttgttacatggatcacttaacagtttttccataattctaatattaaaattagccataattgacctttccattagaaacgtgttgtagaaacccaataataagaaaataataattggtggaaggactaatgtgtaatattaacaatttcaaggatcacttagtaaaaatattgtagcctacaatcaatggttggttgcatctattggtgctcctgctgtcattttctagacttgtattagtttcttctgtatagtaaaccaacatttggaatgatttaggccctgcttgtttcagcttaggattactataatctggattattagttataatctgaaacaaacaggtagattattatgatagattgttataatctataagccagattagtataatctgataatctcctctaaatgtgcttttttttagattattgggtggctaaagactcactacccttattctactataatccattgaaacaaacaaatcatagcttattctattatagcttattataatccagcttatagtaatcttgctcaataatctggattacaataatgttaagttgaatcaaacagaattcagggccttagtttataaaattagaacttgcatggacattttccttttgggatggtgcttgttgtgaaatttctctaccataaagctatacgagttaacaatctgcataaatcttttcgcaaataccatttttttctatataaataaaaaagatcactgaacactgatattcctgatttcctacactctaatcaagtagcctgatgttgacaagggttagaccagcctgcagtaactgcttggttcttggtgggtggtaaaggaaaagttcaaaaatcccaatgtctgtttttgcattatataagaagtgtttgagtactgttcggagttaaaagttttggagattcatacagattggtagaaaatgcaaaattgcgagtctggtattaaagatgaaatttggaaagtataatcctggtgtgagccctttctgaaacctgttgcattttgttttatagattgctgggcggaaccggataagcgtccaggttgccaggagattctcacccgcttgcttgactgcgaatacaccttatgttgagataatctgcctctggtctgtatagcggttttagaggcagcgaattggttcggcttatacatcgtttctttttcccatttctcatcattttgacatcgttgatgatgtaaattggcaacctgtactataataagcaagcctcaaagcatctttaatgttacaccattggtcgtgtgaccattttccatggtactccctccgtttcatcattttccatggttccatggtaccattttacccgcagccatcatttaccaaatattggacctccgagttttgtccctttcccagttacgaagtgaatttaactgttctccatgaacatgttgcgaggttactgctttaaatggtgcttggaattggctgctctcttcaaggtatcctctacgatttttagtcatacatgtttattagttattactcctgcaagtcgtactggcattcctatacaatcaaataagatgttaaccctcctagtttttttttaattttttaaaaaagctccatggcatgtttagattatagccaatataaatcttgccaaaactttagtaggatttcttatgtatttactaagtcggtaacaaactaaacatacatttttttgggtaactttaaaaaaaatggtatgattaaaaatggcatcaaagtgaatagccgctagttccgatattcaactcaagggatttgttgcgtgtcggtcaactggaacttgtttagcagtcgggtagaaaactagaaacacctgcaaataatctgaatgggacgctccattgttcagcattttctaggattaaataattgatagtcttggctacgcatataaatccacaatatctacaccgcgtggttataccgacacctgaacaaaagaaagtcgcacggataccaacagaaatcaccattttatagctatcatatactgagtatgccgcaagttaatccatagattagggctagaaccacgaattagtcttcacacgacaatagcttcaaattcattatttagtgttgggatcaatcttcttccaaaagaaatggagcatctgacgtgtcttttggaaagaacgactcagctgacatccgaattccgaaagtaagtgatcacatttcaagtttttgaccaaatttcaccgaacgaaagtgacaccggctaagaccgactcaacgatcctcacgcacggcgttcttccacttgccggccacctcctcgagcgcgcggcgcgacgccccgtccggcgaccacgccctcgccgccgccgccgcctgcagctccctcgcccggcgacgcacggcgctccccttctcccctggatccatgagctccttcaccgctgccgcgacctccttccgcgacaccacgccgccgtcgccgccgtgtgccaccggacgtagcgccaccccggctacctccgtcaggatgaccgtgttcatcttctgctcggcgtacagcggccacgcgatcatcggcacgccggaggacacgctctccagcgtcgagttccacccgcagtgcgacacgaacgccgccgtcgccgggtgcgccagcacgcgcacctgcggcgcccacgacgccacggcgaggccccgcccgctcgtcctctccacgaagccctcggggaggaagttcatcgggttgctgtggccggcgcccatggagtaaggcagcctgcccgtgctcggcatgcgcaccacccagaggaagttgtggccgctcatctccagcccggcggcgagctcggccgtctgctccacggacagcgcgccgccggagccgaaggagacgtacaccaccgaccccgccggctggtggtccagccactccaagcacgccgactcgtcggggtcctcgttggagttcggccggacgaacggcccgacgaggtacaccggcgggaacgcgccgttctccgcgtctcgcctgaacgcttccgcggcgcccggctccatctccgggaagctgttcaccaagaagccatcggcgccgccgtatcgccgcccctcctcgagcacgtaggcgtagttcggatcggcgcaatcctggaacccgtcaggaatttcgtcgtggcggagcggcgcgcaaccggggagcacgagcgggtccgggaggtcacggtactcaccgacggcggcgtcgtcatggagctccacgacgctgcgcacgacggagatgaagctgatgctggtcgggaagaacacgtacccgggcacgccgagctcggcgacgagcgccagggccggcgtgccgaagaagtcgcacacgatcgccgcggtggtggagccgatgccgacgacgagcgcgcggagctgcgggacgaagcggcgcatgacctcgtacatcaaacagccgccgacgtccgccgggggcgggagaacggcggtggccacggaggccggcagcgaggagagcacggcggcgtcggttcggagaggccggcgagcgtgacgagcgtgggcgcgacgccgtggtggtcggcgagccgccgcgccagctcggccatcgggatgaggtggccggcgccggggctcgccagcagcacgacgtgcggccggttatcctccgccgtggtgctcgccaacggctccatcggtcgtctgtaagacggtgtagtgtgcgactgtgtgttgtgtgtagacgacaatacgagtcgtatatatagcccacggccacgcagctcgagaaaacatatgcgtcattagcaattccccaattataattgtggcagttgacgatatcttttcttcaacaaagctaccggtagctattagtgaacagtgtgccccagaacctagtgaatcttaaaacgaagaaagattatgtgatagtgtagcagccggcggcgatggctcctacaagacaaatctcggttttgatccttctcggacctgtttttttagtaactatataacattcgacagttatttttaaggaaaaaaaactttcacatgtaactaattataacagttattactgttttgctatacttttttgtgctgttcagctgccgatgtaatagtcaggctaaaaaccctaccccttagctctagtttcagtgctgtcttttgaggttgctcttgttgtcttctctacaaaaccagctaatgtggtagccttatgtatctttctgtctgtacccggaccttatagctctgttcatttctagttatggaaatggggcgtcagcccttgataaaaaaaatagttaattacaacgtatctagtatgaaattgttatataactattacataactaataacttatatgtaacttgatcttttctttcaaaaccacatggcattgcaagtgcctagcgtagcggtcttgcaagcaacaagtcaagggttcaattctcgcttgggcacgtgcgatttttttttatatctcggtatcacgaatctcgaagaacatccgacggtggaaaatttgaaatttttaaagaaataaatcagtcgaaagtttttttagcaaaacccttttttttgttaaaagacatttaaggacatgtttgtagcatcttgtgattgtagtagtttcttcgtcatatagggaaagtgtttatcatcctatcgagggaatactcctagttttttatatgctatctaaattgttataattttcttttaaaaaataaataagatagattaatatgaaatactatcactacacaaatatgcaaattcaaattaaacttctacatgttgtaacaaaaataacacataattataaacatactttaattatttttatttttatttttatttttttctttttttggtaatttgtagaggttgaatttaggtttgcatgttaatagagtgatatattttagagtaaatttcacaaaactacaggtaatttgatcaatctactacaaagctacatatttaataaagtgtaacccaaaactacaaatttaaaatcatatttttcagaaatttataaatttaaggtattatatcataaaactacagatttaatatcatattttatcacaaaactataacttttataacctcaatagtgctatggacataaactttaaaatctgtatatagttatttcataacttcaatattaaatatgtagttttgtgatacaatgctataaatttgtagttttgtgataaatttcacactaaatctgtagttttgtgatacactttttaaaactatagttttgtgctagtctggtcaaagtatatgtagttttatgaaatttactctatattttatattaatctaagttgtgaatatatttgttaaaaaataatataactatttagatggcatgaaagaataagagaatgtctccttgagagatggaaatccatctttctatcatataatttaactatgtgtcattattactaggttataactaaataccctttgggcttaactatttgtcactaaaaagaggtgatatatgaggagaattgtaatgtcccgcttctctcaggctgggcccacttacatttggcagcttttcttagatatagattgcccttacagaccaacacaagtcttttctgtacactttgtccttactcgtgtgcatccgagaagaatttcccgagcttttcttggatatagactgccctcacataccaacacaagtcttttctgcacactttatcctcacttgtgtgtacctgggaagaatttcctgatcggtgatgagaagcttttcttggatatagactgaggagaattgtaacgtcccgcctcccctaggtcgggtccacttacatctggcaacttttcttagatatagactgccctcacaaacctcgagaagaatttcctggtcagtgaggccgggcccacttacatctggtagcttttattggacatagactgtgataccattatgtaacgtctcgcctctcccaggatttctcggtcagtgaggctatgcccacttacatctggcagtttttcttgcctctcccaggattttccgatcggtgaggccaggcccacttatatctgtcagtttttcaaggatttcccggtcggtgaggctaggcccacttacacctggcagtttttcttgggcatagtttgtgataccattatgtaacgtcctgcctctcctagaccgggcccactcacccatcctgaaatagtgaaattgctccaggctaagcatgtttaacctcagagttcgttggagatcggctttcagaaaagaagttacaacttgttggtatgagtattctattaatccaggccaggatgtcacatgtaaaatgtaaggttattttctttccattgcacgaatctttgactcgatcctacacttaaaaatttagaagttgtgggacaaaagaactggcgaattaatgtttcttctagcgaattcgaaaaaaagaaacacggcgatatacaatagagtttctagaattatagtggattcagtttgtttgcatcgcactactaggaaaagcattatcgcaagcggccgaaaagggtcttcgcaggcggggcgatcgtccgcctgtaagccaacgactgtgaagatctccgatcttcgcaggcggggcggccgtccgcttgcgaagataattttcgcaggcggacgttggctagtccggtccgcctgcgaaaataggaatcgtccgcttgcaaaaaaaaaaacttccgcctgcgaagataggtagaaaatattgaaatttaataataatttgcccgtaaattacttttaaattatttaatagaaattcttgcaggtagatttttatgtacatatatcggaagattatcaagcatttggtactgagaaatctacatatattgcataactcaaaagtgttgccaaaatatatatatatattacaatatttttttacattgtcacttcaaataacgtcatctagttacgttatggcatagcagtgttccactcccgaagatccttgaattcgtcacttgccgctagggcaccctctgggtcgaagaaatctcctttcacatgacagcactaatggtggatgaagtggcacagatcacgctggacatttgtgattcctgtatcgtcaaagcttgttcgacattctaatcttggcaactgcatgcattgaaattaatcaatatattagtatcataaatatgtggagctgtctagtacatagtatagagacttacatcctccgcgttagtcctgtaccgtccattaaccctaaggaattcgcacgcataatacccgcaaaggaccgttccttgcggttgcttgtgacacttcaggacatatcatagaaaaaagtagttaaaattttcaattagtgaaacaattggaatacattaagtgagtggagtattaccggccaataggtacgtactagtagcttctcccgtgttcgggtttgttctccacccttgaacttgtagtattggtatgcactgtatggatgtcgtaccatttcacagtaaggaggatatttatttataatacattcatatacaaatgcaagagtcataataacttactactataagattgttagaaattctttgtattgcttgtgactgtaatcgagagggtccaagactaccacggttccgtctttagggtggataagtaaacagatataatgatcgctacatattaacaacattatagttagttagtaccagctaaaataagacatatgtgtataagataaatgtactggacttacttaaaattataagcggccatgacgactctcttattttgaaagtgcaagaaggctcgtccaatgtactgtgcgacagtaatcaatttctccttgtgcaagcccttcttgtattctgctatctcttttggattcttgcccttcagctggtcagaccctggtgctagcctcacggtatgctgtgtttggcagatccgagttggatccaagaagccgatgggttcttttttcttcttagcatccatgtaatgcatcctacagaagaagtttgttagtaacaatcacatggatttgtattgtacatatttttcatctaattacttaaaactcatactcacatgcaccaaataccaacgtagttgacgtccatcttatcctgacgatatatggcgtggagatctgagaaatctagccatacgtaaccttctttgccgaaacaatctgccggtgatcgagctgttatattgcccaagccttttttgctggcctccatatagaagttatgtaaccttctcatctcccatggtgcttctttcagtgcccattccagcaagagtgctttcccatgttcgtacttttccgggcaatcatcggttgcgaagtatgttggcccggctagttcagcagccttctgggggtcgtcatctctgagcttggcacgttccttaccccctctaaagacggttaccatgaacttctccttgttctcatctttggacttggagtcatggctcctaagcactcgtggcacctcggggtctttcgcaggagaagggtcttcaaatatttctggctttgtaccatcccattccaatcttggtacttcttctttgtctgacccgactgatgccacaaattacacctctggttctgccactgtaatctccatgggcacatccggcactggaatctccatggctgcctccggcggtgcaatctccatggctgcctccggcaatgtaatctcaagtggcacttccagcactggattttccttttgcatctctggttcctccgccttatcagtcaccttcctcttaggaggcctcgaaggttttcccaaccccggtttaggcaccacaggtttttgcatggcgtcggtgcccaatccaaaggatatgtcattcttgtgccagagaattacaagatcgaccgcatccccaagtacggatacaccatctgcagtcgggaagtcaatgtcgtaggactcaaacccttcgtgaaccacttgcggctacaccttggcatagcatcgggtatgaactcttcattgtatgttctcccagggatagcaatggctgtagcggcctcaagagttttcccggagcgtccaatgggaacgtgcaatctgcagggtgtattctccttgaggtcatcgaaggggtaatctagctcagattctttggtttcggggcgaggcaaaatcatgtgcttgacgtagaaatccatcatttgcctttcaaactccgcacccccttcgtctctaagtttatcctattttatcggcaaaatcatgtgaactggataaattttctattttatcggcaacgctctacagctccggattttcaaacgatacttttccttcatccgtgatcttcggagttctagctcttacccagttccttgatctctgtgtccactcctccattggtaccggttgccccttcttcctcatttcctcctcctctttagtccactgctccaccattggtgcgtatcccgcggagcctaagcgatgacgaaatttgttcttcttggccaactctgcatacttttggctcctttgaatttcttttggagagttcttcaaggtcagaaagtcgtcccactgattgggggttatgttggcatacgtcgaaaatggtgtgcgtcccgtcttcacaaatttcttgttcaaggtggttttccaaccacgccaagacttagccattgtttacagtgcacaatttctcactgctgcctctgatccatccgggaactggaagattttcttcaactctttccataggacttccttatccccatttgatacatgatcccagtccttgaccgtgatggggatcttttcccttaatattatgccacactgtgaactgaatttcgcacgtgccgtcttagcgtcgagcggctctcctttaggcgaaacatgggtaacaacatggaacccttcatcctttctattcacgcttctctcgcccttccttttcttcgtgattgctgaccgttcgctattctttgtgccggttgtgttagctggtacgtcgtcgtctttggacggaacttttttcttcggctgccgttttgatcgccatggcgttgtttcctacgagaaggtatacatggaagtttcgaattagctcgggctaatagttatcacggtgaacattttacatattaagtctacttaccccttctttagggggaatgtagtccttgttgccttcttcaccgtcgccctttttccttctcttcgggcttgggcttggacaaggatcgcttggcgacgagtactcctcgtcttcgtcacctacgtcgctgtcggaactaccttccggtgcgaccgttggttccggagcaaccacaacagcaagggactgctcctgctcccctgaacccttctcttcagtccctttagtactatcggccatcgtttcaaacctctaatataaaaaaaaagagttatcgtccacattttaaacaactttgtaaacaatatgtcgtatgaacaaatttaaattctctgagatttccaaatttaactattatactaaattaattagtacaaactaatttaaattgcgaaatattattaattagtacttactattatgctaaattaattaatacaaacaaatttaaattgtgaaactaatgactacttactattatgctaaattaattagtacaaacaaatttgtacaaaatttgatatgttattatcaagtagtgcaataattgacagttatatttcatcgacatgttgattaaaaaaatggaaaaggcaaaaatatcctccacatttttttaaaaaaaatgttaacataccctccaacatgttatttaaaacatttgacaaattcacatatcctgcaaaattgaacataccctcccaatttcattcacatatcacccacattcccaaattcacattcacaatcaacgtataacccctcattcacatatcacccacccctcatgcccattcacacccacatgcacgcacatatataccccctcacacccacatgcacccacatgccgtgcgcgcggtagaggggctggcggcagtgtaggggccaccggtggccgcgcgcgcggtggaggggccggtggcggtggaggagctggtggcggtggaggagctggcggcggtggagcgggcgcgcggtggaggggtcggcggcggcggcggcagagtggtggaggtcgcgcgcggtggagcggcagcaaggggcggtggtctcggtgacagcgcctggacgacgacggtcggcggcggcggaggacgacgttcggagagtgaaggtcgcaggcgggcggcggcggaggacggcggaggcgtgcggcagcaaaaaatttcggcagcctgacggcgccaaaatttctagggttcccgcctggacttagaaattttggcgccgcgggcttgcccttatatagggcaacgatcttcgcaggcgggcggttcgcctgcgaagatcttttttcctatcttcgcaagcgggccgtccgcctgcaaaaattggtacagagttgaatatatttattccaaaatatacaaatcttaatattattacaaaatatacaaaccttagtattattacttttcaaatgtataaatcttaattgcacataaaaatattactaatttaaattttttaacaaattttttacactacaaatggtaaaaatggtaattgcacataaaaataattacagttttcaaatattactaattttaattttttaacaaattttttacactacaaatggtaattgcacataaaaattagtacaaactaattaatatgcaaaatgttgagtacaattgttcgtcaatttgcgatatgatcacacatcaccttacatgccaccattaaataactactaacttcttagatgcttacatgcctctcaacaatcattaccctttaacatttttgcccacaccgtccgtgcgcatgtaaggcttcacggtcttttgagtagatgtctcgacattcttaatcttctgtacaaactgactataaagtggcatactatcgtattggttgtaatcttcgacatcttcaatcccatccactcccaatatcttttgtttccctgatagcactatatctttcttcaaatttgaagggtctttcacataaaacacttgtgccacgcgattggcgagtacccaagggtcatccttgtgacccacactcgccaggtcaacaacagtaaaaccgaacttatcaacattgaccccgttcgggtattttacccactggcacttaaatatagggaattgcattgtgtgcccatagtcgatttcccatatttcttcaataaacccgaagtatgattgttttttcccggcttcatcaattgcctccacacggacaccgctgttttgcgtacaagtcttactatctcgggctcttgtgctaaacgagtatctattaatgtcatatccctgccaagaatttactgtagttgatggaccacaagccaaccgcttcatagttatttcatctcggtggtgcgacccttattgttagcttgtattagttcgatatgttgatcgatgtacggctcgacgatagcaagctgatgaagcacgctgaagtgagcttcttggaatgatttgtgatcatgggtgacgaatctcttctttcctatcgttcccctgccactcaatctgccctcgtgtcggggcacaggtactccaattgcatatccatctttgaggtaatcgatacatcactcgacaacctcttcagtactataaccctcaaccattgataacactggatgtgcacgatttcggacgtaacccttcagaaccgccatgtaacgctcgtatgaccacatttgatggaggtacaatgggccaagcgcaaccatctgcggcactatgtgaacaatgaggtgctccatcatatcaaaaaatgatggagggaaacacatctcaagttggcactgtgtctcatgtgcgaatgtacggagatttcctaactcttcgagactactaagggcaggttttataaaagaggtggatgttgcatctaatcttgaccacatcatcaactaataaatgtagagataacatgtacaatatatcacatctatactagttctaatacactagccccaatgtttgtttgcccaatctactcttcctctctctcattttgtcttgaattttgtatagtggttgcctcttgcatgagaggtgactgcttatctctctcatctcttctctcctccacctcactccacctcactattttagcttatgtggcacctaggagattgtacttggatgcccatagtacttgccctaatgaccttctgtgacactgcgttgaaaaagtagcacaaccttgtgatagcaacctttaaatgctccggttttattgcccttattgcaattgcaagaaacacggtgagcaagacatggcagtcgtgtaaattataaccagataccgacaaatctttcattgaaactagtcgactgatgtttgatgagaaacctatgggcactctgacatcacggagtgagttgcaaaatgacttcttctcctcaggtgtcagtgtgaaacaggctggtggaagatatactttgccattcttttctccttcttgagggtgtaactcttccctgattcccatctcgactaggttcatccttgattgcagaccatctttagtcttcttcggcatgtccaacaatgttccaactatgttgtcaaacacattcttctctagatgcatgacgtctatggcatgctgaacctccagatctttccagtacgggaggtacttaaaaaatatggaatgcttattgaatgggggagggagtttatcatctggcttcgaactgtcatcttgcttcttactatcccctcccttcgttttcttctcaggtttcttgcgctttgtcccctttgatggtttcttagtcatttttccaaactcgcaaacaattttctctgtcattgcacacaccttttctcccgatgtaggttttggtgcaggatcagtctcttcagtaccatcgaactctgccttcatcttgcggtacttgtgatttgtgcgtaggaaccgccggtgccgcatgtacacaagcttgttgtaacccgggagatacctatagtacgttccattcaagcagatcacacatcctgttttacctttaatttgacctgaaactgaaaacattgttggataatcgttaatggtcatgaagatgatggccttcactgtgaagtattcccttaagtactcgtcccacactttcaatccctctttccataaatcagccatatcttccaacaatggtttaagaaacacgtcaatatcaataccagactgacggggtccctgtatgaggatacaaagtagtacgtattttcgcttttgacaaagccaggtaggaagattatacatggtgagaagcaccggccaagtactatgtgagctgctcatgtctccaaaaggattaactccatcagtactcagggcaaatctaatgtttcgtgggtctttagcaaactctctatactgagcatcaaagtttatccattgacgagcatctgccgggtgtcgaatcatcccatccttcttgcgtccttcttcatgccagcgcattagttccgcatctcgcgggtttgagtatatccgtttaatgcggtctttgacaggaaggtaccacatcacaagctgcgggatttttctctgtcgtccctcagttgcttcatagggttctaggccagtattgctattcgacttgtaccggcttgcaccgcatgttggacattcatctaaagaagcgtactctttcctgtacagtatgcagtgatttacgcacgcatgaatcttttccacaccaagtgaaagggggcatatgagtttctttgcttgatatgtgctggatggtagtgagttaggcctcgggagcattttctgtagaagttctaacagactgttgaaactggtatcagaccatccatgtctcgcctttaacctcataagttcaagaactgaccggtgtgttgtgaactcactatcacagcccttcgactcatcgtacaaaacttcctttgctgccttctgtaaagcttcaaagttatttaaccctctagccgaccccatcagtacctcgggttctgcatgacgtaacatttcctctaggtcgattttgtcctcaacagaaccatcgtcatgcaccatgtcttcaacttgtgtcggaactacattttcaggcccgtccacttgttcttcaccatgacgtgtccatatttcgtacttgtccataaatccacgagttactaagtgctccttcactttaaaagcatcgtcaaagtcccaggctatttcattcttacagtcagcacatggacaaattatcttcctcatattgttcttctcagggtgtgccttagcaataccaataaatttagccacttcgtttctatatgtagacaaaaacctcggccaatgatacatccattcccgactttccatatctctaaaaaaatacacgtaaaatatttgcacaattaataccaaatttgtagggtttattgaaaaaacttatcgctattcaaaactaattaactaaagttaagtgtaaattaataaaaaatcatagtttatttcaattttttttacatagacatgccaaattagtacattaggaaaatctacaaaatcatttcatcggcatattacaaaatactataactattttttgattgcaccgaataaatagacatttaaaattttattctctctctgtatatgacaagatctagatctagatctagaactaggtggtggatgtgatagcaaaaataaaaaaaatttgagaatttatgttaccacattaaaccactacaacaagaggcatcaagtattacacatacatctaacatcaacatatcaaaagaaataaaattaaaaacatggagctcttcctttacaattttgcatgcataaatccatcacaaattaaggtctaaaaagcttaaaaaattgcatacctagtgttgaaatgagtagatataagtaccgtagaaaaatcccccgaagatttgaagttcaaaacctccccctatatttaagtcactttaggagtgagaaacttcggggagaatgaacagggctcggggaggaagaagactatataggggcatcttttcaagcgggccatataagcgtcgcctgcgaagattgatcttcgcaggcggaccatataagcgtcgcctgcgaagatcgatcttcgcaggcgcacgacgtctgccgcttgcgaagatcgatcttcgcaggcgacgcttatatggtccgatgtctgccgcttgcgaagatcgatcttcgcaggcgacgcttatatggtccgcctgcaaagatcaatcttcgcaagcggaccgccccctccaccccgggtactttttttgccagcggggttttggctccgaattacttgcccgcctgcgaaaatcgatcccctacgacgccgaaaatgagttttctagtagtgtcattcacatactatgctctgttatcatacacaaaagataaataggaatgtcaacacacgttacaaattgggtaatttactacagtatatactttacatataaaacggtactagtagtcggaaaggctaaggggcgatcgatcgcccctagcgatcacccctagagcggtccccctcccttcatgtggtttcctttttcggcgccatattacttttctattttagtaaatttatgcacctaaagtttgtacacctcaagtttatatatctaaagtttaaagtttagagaaccaaagtttataagtcaaaagtttatatattcgattcaaatttaaatttgaattcaaatatttattttagatatagtatttctattcatctaaagtttataggcccaaagtttataagtcaaaagtttatatacccgatttcaaatttgaatttgaattatatccgattcaaatttgaatttaaattcaaatatcttttattatagtatttctatgcatataaagtttatagacccaaacttgtcaaaagtttacacacctgatgaatttgaattcaaatattagtttatagacccaaagtttataagtcaaaagtttacatacccgttttaaatttgaatttgaattcaaatattttttatacatagtatttctatacataattttttttcaactttgtttttttttgttttttaaaaatgtatggtgtagtaggaagagaagaggggaggaggaagagagagagtagcttataggggcagaggggggggggggtgcaacgcgcccatcgttatcgttttgtataaatttttcacgtggccagcgacaaccatatatatccaacagtttcttcctgatccacctaggcggcgcgcatgactgcaaaacctcgtacgacggcggcgaggacaaccagctgtgggcgcgctccattgttcagcattttctatgattaaataaatgatagtgttggctacgcatataaatccacaatatctacacggcgtggttataccgatacctggacaaaagaaagtcgcacggataccaacagaaatcaacattttacacttatcatatactcactccgtttcaaaatatttgacaccgttgatttgtttgaccattcgtcttattcaaaaaatttaaataattatttattcttttcatatcatttgattcattggtaaatatagttttacatatttcacaatttttttaataaaacgaacggtcaaacatatgctaaaaagttattgatgttaaacattttgaattagagggagtactgagtatgccgcaagttggtccatagattaggattagaaccacgaattataagtcttcacacaacaatagcttcaaattctttatttagtgttgggatcaatcttcttccaaaataaatgaagcatctgacatgtcttttagaaagaaaggctcagctgacatccgaattccgaaagtgagtgatcacctttcaagtttttgaccaaatttcaccgaacgaaagtgacaccggctaagactgactcaacgatcctcatgcacggcgttcttccacttgccggccacctcctcgagcgcgcggcgcgacgccccgtccggcgaccacgccctcgccgccgccgccgcctgcagctccctcgcccggcgacgcgcggcgctccccttctcccctggatccatgagctccttcaccgccgccgccacctcctcccgcgacaccacgccgccgggcgccaccggacttagcggtagcgccaccccggctacctccgtcaggatggccgcgttcatcttctgctcggcgtgcagcggccacgcgatcatcggcacgccggaggacacgctctccagcgccgagttccacccgcagtgcgacacgaacgccgccgtcgccgggtgcgccagcacgcgcacctgcggcgcccacgacgccacggcgaggccccgcccgttcgtcctctccacgaagccctcggggaggaagtccatcgggttgccgtagctggcgcccatggaggaaaggagcccgccctttcttggcatgcgcaccacccagaggaacctgtggccgctcatctccagcccggcggcgagctcgcgcgtctgctccacggacagcgcgccgccggagccgaaggagacgtacaccaccgaccccgccggctggcggtccagccactccaagcacgccgactcgtcggcgtcctcgtcggaccttggccggacgaacggcccgacgaggtacaccggcgggaacgcgccgttctccccgtctcgcctgaacgcttccgcggcgcccggctccatctccgggaaactgttcaccaagaagccgtcggcgccgccgtatcgccgcccctcctcgagcacgtaggcgtagaccggatcggcagaatcccggaacccgtcggggatgtcgccgtggcggagcggcgcgcatccggggagcacgagcgggtccgggaggtcacggtactcgccggcggcggcgccgtcgtggagctccacgacgctgcgcacgacggagatgaagctgatgctggtcgggaagaacacgtacccgggcacgccgagctcagcggcgagcgccagggccggcgtgccgaagaagtcgcacacgatcgcggcggcgggggagccgacgacgagcgggcggaggtgcgggacggagcggcggacgagctcgaacatcacggagccgaagccgatgtccgccgggaggtcgtcgagggcgacgggcgggagcacggcggtggccacggaggccggcagcgaggagagcacggcggcgtcggtggccgggtcggagaggctggcgatcgtgacgacggtgaccgcgaagccgtggtcggacacgagccgcctcgccaactcggccagcgggatgaggtggccggcgccggggctggccatcaggacgacgtgcggcggcggcggcggcagtgacgtgtcagttgcaccggtggccgcctccgccatggttgagtgcagagtatggagtacgcttctacttatttttggtgtcgtgccgcgtcgcgtcgctttgcagtttgagaatggaaagcagatgccatgtgcaatgaaaattaaggcccagcttggaacttaggaagataaagaaactaattagtaaaaaaaaaaaagaagcatcaggcaaaatttgccacggacatctaaaagctaagctatgtaattagctagaagacactcaaaaaacgcgacactactaataggcaccacaaaatttgtgtaattagctatagtaaatctgagacaatattttatcattttcagtgaaaaagaggagatagaaatttcaaaaggacataaatgccctcggcctaagtaacatgtacccgaaatctccatccaacttaactctaggctaccgatggtgacggcggcggcggcggcaggcgaccgacttcttcttcgacaacggctggtggcggtggcgggcaagcggcttctgcttcaacggtggctggtgacggcggcggcggcttcggctggttgtggcgttgggaagcgacagcggtggtgatggctcggccggtcatggtgcaccaggagctcgccgcgctgcaggagcagcagcaccatgatttcatgccgtcgccacaccaacagcaacagcaacagcagctagtgtagcagcagcaacagtagctagtgcagaacgatgcccaacaacaacagctagcagcagcaacgccgtggccgacgatgccctacgaccaccaccacccgctgctgcagccgctctgcaacgccgccgccgccacggcgcagagctcggccacgtccgcgccaccgacgcgccgccgctgcgcacctgtccgccacggtgctgctgcagaaggcagtgcagatgggctgctcacgaggcagggaccggaggaggaagggaggtcgctctcagcctctcactcgccgagaaccgccagctcctcatcctgctcaacatctccctcgccgtcctcgtcggctgcagcgtcgtgttgctctcgagctcggtgccaccgcttgccgttgcgccttaggtatggtagccgccgcgccttgtcgtcgccggcggtgagaccctggaggagcgccgccgctttttccgccgcgtgcgtgaggaagaaggataggagagagatgtaggcccatgccgcgtgagaccaggtggttaaaacctattaaaaaggacactgtctataacgagaccattctctctatggtcataactagatacctcaatctcatatctagttgctactagtatactcaaaagtgaatgtatttttttttcttcttatggaattttctcttagattactcatccgatttacgatccgattacaccattgtgttcataacaattaaatctttataacaaaatctcacatgactatatttttatgaaaaaatagaaattacttttataatatatctaaattacttttagattttattaaattacttcttagtcataaaagtaattcaataaagcttgaaagtaatttagctatattatagaagtaacttgaaacaaaagtgaagtaacttgttacgacattaaaagaaatctatacattcatgttgtgagttgtttattttataatcatttttagtcaattatgtaatttatgctgattaaatttaatttctatatagactcatgtttttacctccataacggatttacttttaatgtcgtgataaagttactttcttctttttttaagttacttctataatatatgtaaattacttttaggctttattgaatttacttttatgggtctaagaagtaatttattgaaatctaaaagtaatttaaatatattttaaaagtaatttctattttttcatcaaaatataatcatgtgagatcttattataaagattcaattcttacgaacacaacggtgtaatcggatcgtagatcggatgattagtttaagagaaaattatttttgaagtcgacgtagcgtagagcatcacatggcttctaatttggattcctggatgatgccacgtccgtgaatcaccaagccatgtacggacacatcagcacttatgggatcggacaactgatgagcgtgtcgcgcgataaggcaaaacagagagcgcgcgcgaattagattttgcctattaaaaattagattaaacatacactgtccatgatacgtgggtcccaccggtgtttaaagaaagagaaggggcaatccatgcatttagataaatatctcatcccttttgtcccggaaatataataaaataatacgacttgtatcctacggccaattacacgtttttttgtagggtcaatcagccgtgtcatgttttcgcagtgtctctcagccaattaaacgttttttgcgtgtcatttggcaaatctggcctttagtttattttctgagcattagcatactaggtctggtatctctaatacgtactaatatcaaaatggtatctaaggtatcatgcttaccatggtatctaggtaccgaaaaacttggtatctacgagtatcaaatttggtacctaaaaatatcctgctgacattaatacctaaaagtgtttcgttggctaaacggtatatcgttccttagttacccttaaaaaccgtactagtatgaatacaaaagacatgaaatataaatagttagcaaaatctcttgctctcgaagcttgtctttagcctaatggttagttgtatggtgtgtttatatatgggactattcaatttcaactgtcaagtcaaatcatcgatcaaatttggtatatatatgtgtgtccgtgttttggcaatgcacttgatgtttgatgcctataataatattaatgtgtaaaggatacttctttcatattttaatgtatgacgctgttgactttttaaccagcgtttgaccattcattttattcaaattttttgtgcaaatatgaaaatatttatatcatgcttaaagaacatttgatgatgaatcaagtcacaataaaataaatgataattacataaattttttaaataatacgaatgatcaaacgttggataaaaaatcaacggcgtcatacattaaaatatggaggtagtactattttgccggatgatcgaagaacggtcatccaaatggtattaatattgaaagagaaaaggagttacagaagatttttcatggacggtcggttgtaaaggatattcacacgcgtatgtatgcttaggtgtatgggttcggcgaaaaaaataaatatcttatctctaattggtggttacaatcgaagacttcaacacgtatcagaaaattcagaaatggcaaacgtcacacatcatgtgtgttaagcggaatctactcttggttttaattaatttaggaccatgaggtggacgaaagaatgctattggcagatccacccaacaattcaacgaccatatataactaccctaccctagtggttctctaactgattttttttatgcaagctaacgaattccatattttgctgatattaagtcacaaccaagatttaacaactcgtttttcttttcgaaacgaattttttttctcaattttagtgacacagcaggacacatattcctgcaaggtttgaaatttcggttcgaaatttccgaaattcgctcccaccgaaatgctcatatctcgtccgaaactttcggttttttgcaaatttttgtgaatttggtcaaattttattcaaatccattaaaaatcagtcaaaatttcaaaaaatttcgttagaaaaaaaatcctaattttctgaaatttcagttctttcaccccccgtcggcagaaaccgtagtttcgaaatttgaaacactgcattcctgcgtatctaccagtatggacatattttctcaagaatatctcttttttttactcctaatattaggctagaaaaaaaatgctccattgcatcaacgggagtctgttgggccttaatccatgtaacagttagtattttttgaatctctgtaacacttagtattaataggactaattgtagcacaaagtgaagaaacaaaaagaactttatatttagcatatgctcatgaaaccaagacccaaaagtagctccggaaatctcatatgcatccactacaaaattttcaaatattacactctaaaatcaatgagcatgaaaatttcaataagcaaaatcgtttcaataatgctaagaccagctgatccaataatgcaggcctccccgttaatctgcaagtccatggactaagaccaggtggcccataaaagcacacaaacaccgtaggaaaaagtacaccgaaggtccctcaacttgttatcgggataaaaaatgtccttgcaaccagatatacggggtcccttaactatacaaaaccggtcactcgagatccttcggtggttttgaccccggttttagcctacgtggtgcgtgggccccacatgtcagcatgccacgtcaactcccctttcccctcttctctcccttcctcccccctctctctctcgcacttttctctcgcaggccggccgacgggtaggtagcagatgatcgggtggtgagcggggctgagcggcggccggcggaggcggcgtgctagcatgcggaggccggcgaagcggagcggcggtggcggcaagcgggcgagcgtgcggcgaccgacagatggggaacgcgccgggatgtcgtcgacagtggcaaccggcggggagaagaggcgccgggacgggtggtggccgatggggagaacgaccgacgagcgggcggggagacgaggcggcgtgcgtgccgacccgggctgccaaatcttgctatcaaatatttgaagcaacagtacctgtggcatatgagatcgacaatcaaccattcaatccacctataaatggccatatggcccaaggcccacggcctggcccaaagctcgcaaatttggcccggcccaagcacggcatgacccgactggggtcgtgcccatgccggcccggcccgacaaccgggccatgcctgggttgcacccttggcatggtgggccagcccagcactgctcgatcaaataaaaaaaatatagggatgcaaaatagacttaaataatcgtataaggcaaggcccaagacaagaggtacacaaaatagacttatgttccagccatttaaacatagccgacagagttgagggaccaaaaatagactttttctgtgaggaagcacgatgggccacgtaacttcggcacggcccgagtagtattgggccatgcctgggccttgtatgccacccatgggctggcacggcacggcccggtgtatcggtcgggccgtgccggctcgacaagcctcggcccaggcacggccaggcttgggccgtgccgtgccgggcggcccagatggccatctataaattcaccgcaccgaacactattgtttccaccgacaaaactcgcatggcctggagatcactgatgcactgaaccgtggcttccctagtgtgaatttccatgtaacttgggacaggatgattgttgttagcttgcttgacgctggagttggctgacggtgcctggtttcggtctggccatagctgttacgctatcgaaatctcatactccatgcagtggctggtgtggcacgtgtgagtgacttcaggagaggacatggacggaggcgttcttggtggcggcacagacggggcaagcgtcggcggtagcctcgcaggcgccacacaggcacaggtggcggcacgggagcagcagcacggacgcctccgcgacacggcaggccttccacgatgtcgccccggacatcgcgtcggcgtcggcggcagcggcggcggcggcgccgcctggggtctcgaagcatcacgactgcgcgtcctcggcgttgccctcccccgcggcggcggcgacggcacaaggggactggaggagctagttgagcgtggcgcggaggccggcggcgacacccatccacgcatgctcctccgcgctcatccggcggagcttctcctccagctccgcgttgtagcagcactcgcgatccagcttggcctccgccgcacgcaccctacccgtcgtggcgcaccggcgcgccatggccgccgccagcgcccggacgtgtcgctgttgcgctttctccagccctgcgcgcatctgctcgacctgcacgacatccaccaaacaccaacgccgatcaaacaccattcaccaaacacaaacagaggaggccggcagcgtgagcgggtgcgtggcctcgtcgtaggtgaagaagagcgaggcgttggctgtcgggatggggaggtcgccctgctggcctcctctttccctgctcctgcgtcgccgccgccgccgccgcgtcgcctatcgccagcccagagagaggaaaagtgagacagagagaaagaggacgaaaggaaagagagatggtgatgacgtggcatgctgacatgtggggcccacatgagtcccacactgactcagtcgtcacgtaggccaaaatcggggagagccccaagtgcggagagttattttaatcacgtggatgtccacccgttcaatacatataatttaaatagttattaaaaacagtacctttgtgttgaaatggggattcagaaaatgtttctaccatattcttccatctgtcatccttcgttagtcacatatgtgcgatgaacgcagagagaagaggagcccagtccgagtgtctgaccgagcctgtaacgggacattttccaaattcccaacgtgagaacgatggggatagaagaacttttgattgaaatcaacagaagaatctacgggattgcaacgtgtcaggaacctgacgttgctgggtgagctacaggaagctgacaacgcgagggaggaagaacagacttatgctggaagaggagcaagagttcgtaagtgtaacacgcgtgtgtgtgggccggattggaccaaatgagtaccaaccgagcccacgagtaagtctggagtaagagagggagagagagagagagagttgaattgtaataagaacagagcaccctgactttctttcgtatcgatgaagtaagaactggaggcgaaggcggcggcgataccaatcctgctggattcggtgaaactatctcgtttcttgcttgttcttactagttcttgagcagttgagttagggttctaacaatctggtatcagagccttgccgttctctcatttcctggattttgctgcaaaattttttcccggaagaggtgggaattgttgcttcggtgactaattccgcaaaagcttcggctccctcaactgggttagcgagatctagaacgagacgtcaaccacgggcacttacgagaaacctcgctatgtcaccaagcaagccgcgaagatcatggatcaggatgggaaactggatcttcttctcaagaagatggaggaggcggagaagaagcgcgaggaaagtgagaagaagagggagcattccgaggagaagagcagggctgagctcatggcgctcaaggcagtggtagaatctcgtttcccagctgtcgagaagagggtggatgatctacaaggttcggtgaaggatttgcaaggcaaggtggagcagctgcagttggatgtacaacaatttcctcaagagcaacctgctattgcttctatgctgaatcaaacaggtgctctaaaaacctctattcccttccctgatgtgactgatttggatcgatccccttctgatgtagcaaattctgttggtgtgatgggtttggggggtagtgttccaccgatgtcttatcctcagtttgatggtgttaatcctcaaatgtggaagtggaattgtgaagaatactttgacatctatggagtacatgctaagaattgggtcaggatagctggtttgtactttgtgggtaacgcagccttttggcttcactctatgcggtctaaactgtcgggagttagttggccagtttttgctgaacaagtttgtgtcaaattttctaaggatgactaggaaattcttatcaggcagtggattcatcttgtgcaagatactactgtgtctgaatatgtagaaaaatttgacagcattatgcaccaactgttggcttacaacaattcactgcctctcaattattttgtgaccaagtttgtggaggggctgaaacaggaaatcaggtctgcagttctgacgcagaaaccacaagatctggattcagcttgctcactggctttcttgcaggaagaaattttggaaggttccaagtctgtcagtcacaaaaagtctgatcagcctattcttgtcaggaactctttgaagtccttctctcctcaaggctattctaattctgttgttaagggcacttcatcagccccatccgatgacaggagagggtctgacagtaccagggctagagatgacaggctagccgctctgagatcttatagaaggtccaaggggctgtgttttacttgtggggagcgctggagtaaggaacacaaatgtgctacctctgttcaacttcatgtaattcaggaactattggaaaccttgagtcctaattctgttgattcagatgagcaggaaatggaagaaggtaacctgatggctatatccctgcaagctatcagtggtactgagtctgctacttctttcaagataaaagggtgtattcaaggaactgaagtgctaatgctgatcgattcaggcagttctcattctttcttggacacccaagtagctcacaagttccaaggtgttcagtcattatagaaggtgatgtcagttaaggtagcaaatggaggtatcatgttatgttctcaattgattcctcattgtgcttggtgggttcaaggagtaggtttccattcagactttaagctgttgagtcttggagtttatgatgttattttgggtatggactggctagtaaccttgggaacaatgaatattgattgggctactaaatggatggagtattagttggggaacaaaacaatcagaattcaaggaattcaggctcagactgaacactgtgctcccatttcagtggaaaaatttcaggaaatgctaaatctcggttcagtcatgcaggtctttcaactgcaacatctacctccagataaacttgttgaagttcccctgcaattcaggcctcttttatctgaatttcaggatatttttgctgaacctactggtttacctcctaagagagcgtgtgaccacagaattcctttgttgcctaactccaaacctgtgtacatcaggccgtataggcacaatccagcacagaaggacgaaattgagagacaggtgaaagagatgttggcctctggggtgatcagacctagcagcagtgcatattcttctcctgcacttttagtgaaaaagaaagatggtacatggagggtttgtattgactatagacaacctaatgccataactgtcaaaggtaaatttcccatgccagtcattgatgaacttttggatgagttatctagggctcaggtcttttccaaattagacttaagggcagggtatcaccagattaggttgcaggaaggtgaagagcataaaactgccttccaaacccatactggccattgtgagtacatggtaatgtcatttgggttgactggtgctccagctacattccaaggggccatgaatgatactcttgcacctgttttaaggaaatttgccttggtcttttttgatgatattttggtttatagtcaggacatgcagtctcatctcactcatctcaaggaagtgtttctcctgttacacaagcaccaatggaaagtgaagctcagtaagtgttcctttggtcagtcccaactatcttacttgggacacatcatcagtggtaaaggggttgctactgatcaatcaaaaattgaagaggttgttaattggaaagtgcctgacattgtcaaaaagctaagagggtttcttggactggctgggtattacagaaagtttgtcaaaaattttagagtcatcagtaaaccattaactcagttactcaggaaggatgttccttttgtccggtcctctgaagctaatcaggcatttcagtccttgaaggtggctttagttactgctccagttttagccttgccagatttttctaaaacattcactatagaaacagatgctagtgatgggggaattggagctgtcttatgccaagaaggtcatcctatagcatatgtgagcaaggctttgggaattaaaaataggggattatcaacttatgaaaaagaatatttggccattcttttagctgtggatcactggaggtcttatctccaacatgctgaatttattattctcacatatcatcacagcttgatgcatttaaatgagcaaaggttacacaccccttggcagcataaagcatatactaagttgcggggtttacagtttaaaatctgttataggaagggatctagcaatgctgctgcagatgcactttcaaggaaatacaacctggaccctgttgacctcatggcagtttctagttgtgtccctgtttggctccaagaagtggctgctgggtacttgctagatgagcaaactaagcaacttttagcagaactgtccctatctgtcaattccaaacctcctttctctcttcataatagtattatcaaatacaaaggtaggatctggattggttacaatactgaattgcaacatagaattatctcaactctacatgacagcccaatggggggtcattctggtttccctgtcacatacaggaggattaaatccctttttgcctggcccaaaatgaagcagactgttcaaagggcactcaagggctgtggagtttgtttgcaagtgaaacctaacagaagcaaatatcctggtcttttgcaacctttgccagttcctgatggagcttggcaggttattactatggattttattgagggtttacctaagtcatccagatttaattgcattatggtagtggttgataaattttcaaagtattcccactttgttcccctggctcacacattcactgcccttgaagttgctgatcttttatgcacaacatttacaaactccatggccttcctcattacattatctctgatagggacaaaatcttcacaagtcatttgtggcaacagctgtttgctaggtctggaactcagttgcacctaagcacagtctatcaccctcaaaccgatgggcaaactgagcgtgtgaatcagtgtttggaaatctttttgcgttgttttgtgcactctatgcctcataaatggagcagctggctttatttggctgaattttggtttaacacttcatattattcaacacttctgaaatctccttttgaagtcttgtatggctatcctccgggacattttggtatccgtgatgattcttgttctgttcctgatctggataattggttacaagaaagaaaacttatggttcagctcttgaaacagcatcccaacagagctcagcagcaaatgaaatgttatgctgataagaacagaagcgttcgtgcttttgaagtgggtgatttcgtctacctcaaattacaaccttatgtgcaatcatctgtttcacggagggcaaatcataagctatcttttcgctattttggaccctatcaagtgttggccaaggttggcaaggtagcttatcatcttcaacttcctagtgacagttctatacatcctgtctttcacgtttctcaactgaaatctgctgctgggttctccaaagtggtgcagcctcaacttcctgaaatgggtcaacttaaggtccctgaagttattctgaacactcgtcaggttcaacggggtaagtcattaatacctcaagttttagtttgttggtctggagatgttgcagggcaggagacttgggaagatcttgttgatttgcgtcagcgctttccagcagcgttggcttggggacaagcccaatctcaaggagaggggattgtcaggaacctgacgttgctgggtgagctacaggaagctgacaactcgagggaggaagaacagacttatgctggaagaggagcaagagtccgtaagtgtaacacgcgtgtgtgggccggattggaccaaatgagtaccggccgagcccacgagtaagtctggagtaagagagagagttgaattgtaataagaacatagcacgttgactttctttcgtatcgatgaagtaagaactggaggcgaaggcggcggcggcaccaattcttctggattcggtgaaactatctcgtttcttgcctgttcttactagttcttgagtagttgagttagggttctaacacaacgcaaagaaactagcacattaaatcccacattgatgggaccaaaactgatgttgttgggtggaggcgacgctatagctcatggtcttggatgcaggtcttctacagtactgcatatattgctcactgacatgtggatcccacagccacttgggcccacatatcagtgagcagtactgtacatgcagtactgcaggggatctcaattgcatggttttgggtagagtgtgagtgacaaagttgctcgacttcaataggaggcggtggcatcctcatcacggctactcttgtaggtggaggcgtcggaagacggagcagcggtggacaatggtgcctccagtgcaggggtggaaccagacaggactaacagaaaggactgaacaaagtatataaaactatagctccttcttctaataaatatatgatagaaaattttagtgaaaacttaatggggcttccatggttataacgctgatagcaaaggctcgcgtccccgtcgtccccatggcagatccgccactgcctccatgttaattagaccgcagcagagactcctgcattgttgagatggagcaacagggtggagggaagggcaaggacatggttggccttgatgatggagcttgatctattatccgccgcttggatcatgtaacttcaaatgaggtactactgatatatatatatatatatatatatatatatatatatatatatatatatatatatatatatatatatataagcaatctcaggttgtcttgataaaaatgttctgccgggctgaataattggttatatttgagcttacccaaaaaaaattatcctttatacaaatgaaataaagtagctcagcttcatttagacgacgggattagtacgataccgtagggtagttcgactacgctttgcttttatttttttcccctcgtgaccttttgtgtgtgtgaagcggtataggagaggaagaggagcaataggggacatcggtgctccagtggatggaaggcctcgatggcagtagcagaggatgtttgcaggcatggatcacatgagtagggtggcagccggcaaagggagtaagggagacgcctcgaatggcgacggaaagagctcagctccagcagcaaatagtatagtggtggtagcctgtggcaatggctataagagaggggagatggggaaattggattcagtgggttgtggcggtgatgcgatgagaggagggaagaggggtactagcagaggagatcagccgatgagaaggattggttggacatggcagagagaggagagctcgaagagcttgatgcacagtggggagaggggatgtgatgatgacgaaccgcagcgacaatggtgccacagggaaggagcgagacgtttgctcggtcggctaggccaagcgctaacatgtggggcccacgtgggtcccacttgccacatcagtgaaaaatgatcattacactgtcgacagaccaaagttaacacggtattatgaattagtgtatgggctatacctagtatttcagtgcatggacgaatttcagactcagatgacaaattaagggacctaaagtgaacttattcctacaaaattataacttccaaatgaatacttaaaagcttattattattattatggcgtggatgcacatggatacttatcattatacacgtgacgacatatatataacatatgcacacatccataaatatactcccaacacacacgaataggcggagaacaacaatacgtctctaatcttactaaaatacgtgtgtactccctataaattttaatgtataacgccattgaccttttgaccaatgtttgaccattcgtcttattcaaattttttgtgtaaatataaaaatatttatgttatgcttaaagaacatttgatgataaatcaagtcacaataaaataaatgataattacataaattttttaaataagacgaaatgtcaaacgtttatcaaaaagttaacgacgtcaaacattaaaatatggaggggataatatttaacaccatgtgataaatagttgagacaaaatatactttatacgattattactcaagtaaatcagtgcagagaccgccagactggtaaaaagtggtgacagtaatagattaatagtacttctagaagaaaccgcgatacttaaatatgagatctgagcaattagggtgtgtttggttgcccatattcccctagcctggctcatttctcgcatccaggctgagtttgacctggctaagagtatacatatgcagttgtttggttggttgcattggtctagccaggctagcatgagattttgtttggttacttgtataagagatacggtttgaaagggattttgtttggttggttgcatggatgtgagtgttctttacctcttcatttagttgggtgaggttacctctacaatatatataacaaataataagagtattttgatttatccaattgaatattcacttacatatgcgaatgatactgcaaaatcactctattatctacataaaataagtcggccaacttttcacaccgaatcagtggtacgaaaaataagaaaaaggttatctattatattattaaaggaatagaaaaatgagcctccacgttcgctctcatggcctagaaattctcacattaatcggagaaaaagaaaaagcagagtccatgtagaaatacaatttagaaaatagctgaaatttggaattaaaaaaaataagaaatattagaagaggagactagagtccatatagaaatacaatttagaaatagttgaaattcggaattaaaaaataaggaatattagaagaggagactagagtccatatagaaatacaatttagaaatagttaaaattcggaattaaaaaataaggaatattagaagagaagactagagtccatatagaaaaacaattaggaaataactgaaattcggaattaaaaaaataagaaatattagaagtagagtatagagatacaatttacaaaaaattcggaattaaaaaaaagaattattaaaagacgagtctagagtaggaatatatataatttacaaataactaaaactcgatattaaaaataattaataactaacacgtatataaaataccatatgaatattacacatttgtagtttcgtaaagttattgtaaaatttaaaattatgatgttattttaatatatttgaataatataataagaaaacatatatgctattatatgagagaaaatataatgatgctagcgcgcaatctgtgcatgccactatgctaggttttctttaagctagatgaaccggtggaactaattaatctattagtagtaattctgcatacattgacttctctgttgctggagtacttgctagtgagaaacgaaagaaaaagaaaacagaaaacccggggagaaaaaagaaacgaaagagagaaaggaaggggatcggcgttgcagccgtcgcttcgtcgtcatcaactcccgtccgcccgcagccgcatgcatgcccacctgcccgccgctcgccgttcctccacccatcttcctgcgctcctctccatccgccgcttgccgctcctctgctccagatctgaccggcacagaagaaggtgggatacgacggtggccgacgattgaagatgggatacgatgggaagaggagggatgcggcagcaaggtggatccgccgtcctcgtcgccgcgacctccgctgagctcgtcaccgtcaagctttttgccgcctcaccactagttggatctggcagtgctcacaccatcagcggggacgtgtgggcaaggcggtggccggatattgaaggtgggagacggtgggaagaggagggggatgcagcagcaagttggattcgtcgggcgccactccctctagcagagctcgtcttcgccatgtcgattgctgggggaaaatgaggaggagcaaggggcggagtggtgaccccatcgcttgcccttgcacacgcgggtgcggggcgctgcatgcgcggatgcagcgcgttgcatcgtgcgggcctggccgagcagcgaagctcaacttgagcgtttctgctcagcctggctgtgggggattttttgcatccgctcgaccaggctgggagcgagctgcaggcaaccaaacagcgacctactgcatccacgcgtgcgagccaggtttcatgcatgcaaccaaacacacccttaatctctccctccatgcatcacagtcacacacaccgcgagctccgagctccgtgctccatggatccgtcacctcggccgtcgccgcacgtcgtcctcgtagccagcccatgcgccggccacgtcatgcccatggccgagctggcgcggcgcctcgtcgcgttccacggctgcgccgccacgctcgtcacgttctccggcctcgccgcgtccctggacgcgcactccgccgcggtgctcgcgtccctcccggcgtcctccgtcgccgccgtcaccctcccggaggtcacgctcgacgacgtccccgccgacgccaacttcggtaccctgatcttcgagctcgtccgccgctcgctgccgaacctccggcagtttctgcgctccatcggcggcggcgtcgcggcgctagtgtcggacttcttctgcggcgtggtgctcgacctcgccgtggagctcggcgtccccggctacgtcttcgtcccctctaatactgcgtcgttggcattcatgcgccgcttcgtcgaggtccacgacggcgcggcccccggcgagtaccgtgacctcccggaccccctccgtctcgctggggacgtgacgatccgcgtcgccgacatgccggacggatacctcgacaggtccaaccccgtgttttggcagctcctcgaagaggtgcggcgataccggcgagcagatggattcttggtgaacagcttcgccgagatggagtcaaccatcgtggaagaattcaagacggcggcggagcaaggcgcgttcccgccggtgtacccggtggggccgttcgtccggccatgctccgacgaggccggcgagttggcgtgcttggagtggctggatcgccagccggcagggtcggtagtgttcgtctccttcgggagcgccggcatgctgtccgttgagcagacgcgcgagctcgccgccgggctggagatgagcggccacggattcctctgggtcgtgcgcatgccgagccacgacggcgagtcctacgacttcgcaacggaccaccgcaacgacgacgaggaagaccgcgacggcggcggccatgacgatgacccgctggcgtggcttcccgacgggttcttggagaggacgagcggccggggcctcgccgtcgcgtcgtgggcgccgcaggtgcgcgtgctgtcgcacccggcgacggcggcgttcgtgtcgcactgcgggtggaactcggcgctggagagcgtgtccgccggcgtgccgatggtgccgtggccgctgtacgcggagcagaaggtgaacgcggtcatcctgacggaggtggccggggttgcgctacgcccggcggcggcgcgcggcggcgtcgacggggtggtgacacgagaggaggtcgcggcggcggtggaggagctcatggatccaggcgagaaggggagcgctgcgcgtcgccgggcgagggagatgcaggcggcggcggcgagggcgcggtcaccaggcggggcgtcgcaccgcgagctcgacgaggtggccggcaagtggaagcagacaaaccgtgctccatacgaataatgctgtttagtttggcaaatttcgttgttcgtaaacgaattcggctcaaatttggttggtgatcactactgacttttggtgatcactgcattgctatctcgaaaggaaacctcaaatgcttcatttctctcttcttttttttttttgaatggaaatgcttcatttcttttggaatctgatcccatcgtcctgaacacagattaaagaattgtaagcatatttcatgtaagctgattctcctgcccctatacctagtttatgtacgtacccaaacttgcacaacatacaaaactgtttgctggtgttatgcgtgcaactttctttcatcgcctagggtgtaaaaactttaaagtatacggacacacatttaaggtattaaacatatactaataacagaataaattacagattctgactataaattatgagatgaatttattaagcctaattaatctgtcattagcaaatatttactgtaagcatcatattgtcaaatcatggtgtaattaattaggctcaaaagattcatctcgcaatttacatgcaaactgtgtaattggttttttccccacatttaatgctctatacatgtgttcaaacaattgatgtgacgttttcggccaaaattttttgggatctaaacaaggccctaggccatgttttttttctcctagtagtacgtgcacatggatttatagattttgtacagtctagttcatattctatttttcttaggtttagattcaggccgtgtttagatccagcggtaaaaagttttgacgtgccacattagatatacggagacacaattaaagtattaaacgtagactaataacaaaataaattacagattccgtctataaaccacaagacgaatttattaaacctaattaatctgtcactagcaaatgtttactatcactactacacaaaacattttcatggacgccggacctgtttgtttccaggcaggccataattggcactgcacgagataatcaggggaccggcgccagaccgtcgcccgcacggaaaaacgcattatcccgtgcgggccactttactcaaccgcacacgaaaatgtcgtgctggcctctttactcaccccgcacgcgaaaacaatcctcatgccaacttgctacacgactgccactttaactctcccactcattctctcctcccactccactccttctctcctcccggcctctcatcctctcctcacagcagcgacagcggcggcgtgcggtccctccctccctctcccttcggctcccttcccctctcctccctccgcttgcagatccggcgaagggaaggcatggggacggcggatccggcggcaggcgcaggtggaggcggcaggtgacgacggcgcctcgcggtccctccctccctctcccttcggctcccctccctccccttgcaaatccggctgaggggaggcatgggggcggcagatctggcggcgggtgacaacagtggcgcgcggcccctccctccctctcccttcggctcccctccctccccttgcagatccggtggaggggaggcatgggggcggcggatccggcggtcggcgtaggtggaggtgacagcggcggcggcaggcgacgacggcggtgcagaaagagagggagacgccgatgagggagggggtggggaggccggcgagctttctcgaccttctcggtggatagagtaggccggcggagctcacccgccgctgcttcactcctcctgcagccacctccgctgttgctgccccctccaccgctcaccgccagctccgctctactggctttctccgccctatgccgctgcgccctatgccgctagtagcctcccaagtttactaaagaagagaagagaagaaaggataagagaagaaagaaaagagaaaagaagatttgctgaccccacatttttccttctcacttatatgtgggctccataacttttttttctgactaggatgccacatcagcgtagccagatatccatactgctataggacccaaattgcatggttttgtatagtttagggggtgaagatttctagtattggggattagggatgtcatgcgaacttgatgtaaagttgagggacggctggtgaacttattccaaagaaggcctaggagggagggaagagaagaggacttcgatggcgggccaaaagtgaaagagagagctttgggcaggattcgccccaaaaagatggagatgattaattttagttttatcattttaattaaccctgaaattggttgttgttgatttaaaattataggttgctctgaaaatttcagtaaaaattgagggaccaatttagagcatggagaatttaagaaaaatacaccaagccactttgaatttttggatgtattttagtatttgaaatttatttgagacttttattaatttctattattccttttagaaagtgacttttaatttgggatggatctatcaggtgtgacataacgataagagagctccaaattaatttcaagacccaaattaatctcgcgttagatgttttctttcaccttcgagtagacaaagagctctctctgtgtgttccatcttcctttggttttggttctccctgagcagacttgtgtccgttcttctgtttttgcgctgattcagttgttcctcgatcctgaatacttgcacgcatgagtatttgggataagcatgcctccggaacgccatccaccaccagagtacctgcactggtagacatgcggttaagtttgtatcatttgtttcaacatataataagtaaagctaaacatatgtacttctagcttgttgatgtgtaacataagcatggttatatacaagctagtgatgttctcatcagtttggatatttataaaaaacagcaataatgcacacgctcacatatacacatacacttacgtaataatataaatacacacacatacactcattaatacgaatgcacatgcgtatatactctaacccatacggtccaatatatgccttattacacatcactctctagtctctacttgcatggaagcacgctttatctaccaaccagcttgttcagtatgccaccatatatagattatggcacacatatcctccataaatcatcattttagtatatatttgctttctattcttgtatgtcataatgtcattcatcaaacttgtagcttgacaatgtacgtatatatagagggagagatatgagatatgatgaatcgaatttgaagatgctcggcatacccggagcatgtctaggcaagctgttgtccggcctggacatttctataattactaaaacttgaaaaaaaaatccaggaagatattaggcatttgtcattttgccccctatgttcaatttttgtgggttgttagtttataaaaatatgcatagtttatcaagatgggactgtaatctccaagcttgggatgagcagcatatatattgtgatggttgatagcatatggcttatctcataattcatgacatcacaaactattgggtaaaggcattataataggttatagcaacaaatataaaattatgcttagctgtgcaaaattatctaattgatgactatttctaaatacacatcatgggcaaaaaggtgcgaaaagttagtggcagagtacataaatttgaaaagaattataagtagttccgtactcgacatataacaaaactaaaatattcacacatttcatctccgttactttatgcggtgtataacatgagtgtacaagctagacaaaaatgacaacaaaaatacaacttttttgttgtaaaagaaaaacaaacttatcccatgcagaaactttatgacgcaggcacaaataaagccaagaaggaaaaacatctaaagtgtagggatagaaaatttctgaactaaaagaatatgcatttttctacaaaacacaataaaagcctagtatacatatagatgtcttgttaaccgactttgtgtatatatacttttttttttgcacaactcaatacactttataggatgtctattgtttatactccaagtaactttgtaactgccttacattccaagcggctttttcttggctataaaagggacctcatgtcttgggaaatcacatcagttgagtttccattatcctttcaataaatagccatggcaactattgcattctctcgattttctatatgcttttgtgtccttctcctttgccatggttctatggctcagatatttagtctaggcataaatccatggcaaaatcctcgacaagggggttctagggagtgtaggtttgataggctccaagcgtttgagccgcttaggaaagtgaggcatgaagctggggttacagagtactttgatgagaagaatgagcagttccagtgcaccggtacattagtaattcgtcgcattattgagcctcagggccttcttttacctcgatactccaacactcctggcctagtatatatcatccaaggttcgtgtgactttcttgttagtaaaaactttattgatagtgtatgtttggtagctgtatctataatctatctattaagacataaacatatacatttggggctcagtaaatttgatgtgtgcatcctcttttgcagggactggtgtactgggattgacctttcctggttgcccagcaacttaccaaaagcaatttaggcattttggtcttgaaggaggaagccaaaggcaaggaaaaaaattaagagatgaaaaccaaaagatccaccaatttaggcaaggagatgttgttgcacttccttctggtataccacactggttctataatgagggtgacacccctgttgttgctttgtttgtttttgatgtaaacaacaatgctaatcaactcgaaccaagacaaaaggtactattatctaaactaatatatccaatctagctagcagatgttacgtattttatcccctattggtttgcattaaattcaatatgctgaacaatttattttgtgcaaaaatttaggagttcttgttagctggtaacaatatagagcaacaagtgtccaacccctcaatcaacaaacattctgggcaaaacatattcaatggattcaacactaagctattaagtgaggccttaggcgttaacatagaggtgaccagaaggctacaaagtcaaaatgaccgaagaggagatatcattcgagtaaagaatggccttcgattgataaaaccaactatcacacaacaacaggaacaaacacaagatcaataccaacaaattcaatatcatagagagcaacgatcaacaagcaaatacaatggcttggatgagaacttctgtgcaattagggcaaggttaaacatagaaaaccctaatcatgctgatacttacaaccctcgtgctggaaggattacaaatctcaatagccagaagttctccattcttaaccttgtccaaatgagtgctacaagagtaaatctataccaggtatatatttacaatattagtattcttctaacattcataatccgattaacatcataattaaatttcatataaccttgttctttacacttgttgcagaatgctattctctcaccattctggaatattaatgctcacagtttggtgtatacaattcaagggcgtgctcgagttcaggttgttagcaaccatggaaaggctgtatttaatggtgttcttcgtccagggcaattactaattataccacaaaattatgtggttatgaagaaagcagagcttgaaggatttcaatttatcgcgtttaagacaaacccaaatgccatggtaaaccacatcgcggggaagaactcagttctccgtgcaatgcctgtggatgtgatagctaatgcatatcgcatctcaaggcaggaagctcgtagcttgaagaataataggggagaagagattggtgctttcactcctagatatcaacaacaaaaaatccaccaagagtactcaaatccaaacgaaagtgagactcaagaggtgatttaaacccaaggcattatatactaaaaaataaagccacatgcataaagctttgtggagttttgtattttgtcgtatgtgtaagttaaataaaaaaagaattgccttcatttaatcgatttgtgcacttactccctttatatcccatcttatttttttctttagtaaattaaattactcttgcctctctaaggcgcctttgtttttagcaaaaatcaacatttaaaaattgactactaatttaactaaaatatatatgtgttacgtgttatatactctcatacatgtaccttatattcgtgttttaaagtaattttatatgatactaattaagtggttattgacaacatattaacaaaaggtcaatgataaaaagatagtgtcggagactatgtcaaaaagttaaaattgccttatattgtattttagaacggaaaagacgtaatttgcatacttgcgttccatcactgcctcacggcaaacagtgtcgtggcaccaagtttctcgttgatcatcagtaatttactgggtcatatattgatcagacaagactacaagtgcgcaagagcatacgaggaagggagaggagcggatcatgtcatgtgcgatgccaacaaaccccggctagttcgatcttttcacttctcaagtcagtttcactgcaccacggacccagggcctgtttggatgttgccctaaagagaatttgcctgggttgagagtagcctgactcattttacttcttgtttggttactaccctgagaccgaaatcggtcgcctgagctccaggcgtagcactgttggtggattacaatgtaatctctctcagctacacgaaagtcactgccgtatgaagctcccaccgtcgcacaaagctggctcgcgtggatcccgggcaccgcggctgttgtcgttgctgttccgcccatccggcgaagcccttgccgccgtcgccgtcgtcgtgcgatgctaccgccccttcagatctagcttcccgcaaagcttccggcgaggctgtcaaatcccatcgtttgctgtggcctaccgaggctgccgattgtttggttcatgaagaaagctgcagacttgttgattgaagctcactgctaaaaaggatcaataaagatctaatttgctataggttgtaacgctccgtttttcgtgagacgttaaaaactaattcggaaaaatcctatatgcaaaaattccgttctctgtgtgagagtctaagtcgtgccgtggatctcaattcaaatccgtccttgttccctgtcatcgccataaaaaatcctccacctcaagatttcaacttccaaaatcaaacaccggaattcaatcccgtccttgaattccttgccaatatttctcccgattccgagaatgtcaaatccgtccttgaatccctccctgtccatcgattgatctatccacttatctaacctatcaatccatctatccatccacctttctgtctacctatcgatctacctacccagctgtctatctatctattgatctatctaactacctttgaatccttgccaaatattcgccccgactccaaaaataaccaaattcaaattttgaattcgaatccaaaccctaacctcaaccattcaatccctctgaaaaagtctattttgcctccctctgcttttgtgggccgaattcctctccctcggcccatccctctctcagtccgttcccccccgcacgtgattctccccgagagcgcccctctctcccttcttcctctctccctctctctccctctcgatttttttctctccttctcagcgtcgcttcccgccgacgccgccactcaaatccccaccgcctccaccgtttcccgcgcgtgcatgcccttgtggcggtcgtcgcccggttgccgccgccgtcaaccctgccacgcatgcgccgtgctgccgccgacccccaccgtcctgctaccgctgtcgcaccacgccgcgtgcttccaaaaccgagaggcagagcgcctctctcacgtgccctctctcctcccttttgctcgcccaaatcggcaaggagcagagctcccttttccccttcttttccactttgaccatgccgcgcagctccttccgtacccgggattcgattttcgccgtccgatccactgccttcgccgcccaacgcatcctcgtcgtccgctgttctcgcgtcgcccatgatcgccagccgagcaccaaccaactcacccacgcctcccaaaccgacatcgcctccactataaagccaagccccctctcaaatccctcccgcttcactctccaccgctgccgcgccatcgttgccgcccggctgctcgccgccgtcgccgctccttctgccgacaagcgcgagaagccgaggcactctgtggtgccgatcgccccatcctcgcgtcccccctcttcttccccggccgcgccgtcttggcgccgtgccgctcccatcgcggcgaccgtctcgccacgagcagacaacgccatccgccccgcctcagcgtcgaacccgccgaggacatctctgccaccggcgcgttccttccttcctagtgagctctgcttcccttctcccttgtaaacggcataaattctctgggcatgctcatttacacgggagattatggagttgggtcatcgccgttgctctgtttccgccgccggccttcccactcgcttacgcgccgtgccgccatggccgccccccttcctctcgctccctcaccacccgccttttttgctgccgccgtgcgcagttgcgttccgccgtcggcctccctcctctccttgattcccgtcgccgccaccaccccccgaacctcctcgaacctcctcggcgcgccgccgcggacgccgcctcgccggccgcgcccgcgccgtgccacccatcccgccgtcgcatggccgccgtcaccagccgctgttgcaccgcctctccatcattcgagccggtggatggaaccgcgtcgaccccctctcgcttccggtatccgcgcctcactcctgttcgccgccgttcgccggcgcctctcggccgccgtgagttgttggatcccggccggcctcccctccctttcctccatccaacgtggcagccacgtcggcttgacccagtcacgccgatcctgtcggcccctccctccattttcccttccatgctcgcggtccacgacaagccgtgcggcaacacgtgggcccacctcctctccatccacccagtgcaccaaccccgaaccaaccccaccgaaccctagcgccactacccgcgtgcgccccttccaccatgagccaagccgccgacatgtgggccccatcccgggacccgtgtggtggaccgcatccaccggaccgctccctctctcttccacgcgccctaatgggctgccttccccgcacccgcaccggcccaaatggctcggccgagcctccttcaaccctcgggccgcgcccttgccgcccgagaaagtctaatatacatccctcgtccatttccttttccaaaaatcaattccttattattccaaaattccataaatcaattcctttggtcccgcacgtcagtgattgtcaataatattcttgagaatattatttctataaattccataaactattccttgcattccagaaaatttcgataaatcatttccttgtccggaaaatcctattcgagcttccaaaattcatatctctcaatctgtagctccgattgactacgttcaacttcctataattccgtaaaattgagatctatctaatggcactattaattagtctaaatagggtttttcttttggtcttttgtttaggttttcgattgtttgcgtatagttgcggttaccggattttcgtcgatcgctggttttctcgaagattcgtgaagcttcgtgaagaccttgagcaaggcaagtcaccctttgataaattactcctataattgaaaagtcattattattttgtttgcaactcgcattattagaatcacacacttaacttgcttggcctcggtttgcgtgccaaatcgacggacctacccagtagtcgcactatttcctgtaggttgtactaccctgattccttgtcgctccacccttgtgtggtacttcggtatccgtgctctctgagcgcgtatacctaatatcccacatacaccgttgattgtcgaaaacttgggaaatgggtttgtgaagccttcaaaacccgacatgtggtgtcggtgtgttcgaaaataaaatgaattgtgaaaactcgcgatgcgggggttgtgcctatgtggcactgtcccgtatttgcatataaggaccgattcctgtggggaactcatcgaacataatcaaagtgcaaccacaaggtggaatgggacaccctggctaagtaactagtcggttcagggaaacctcgcatgccaatagttgggaacgccggggcggggtcggttggagccaaaccgggttcctggtaaggcaagaacgagaagcttgctaacttaccgatcgaggtggttggagtttgatttgtgaaaactaaaatggcctaaatttatgtgaggatttgatccttctatgtggcatgaggtatccctgggtcggcttgggaaaggctttgtcgcgaacctctgacaccggccagtgtctggagtaagttcttgtcttgtgggtaaagtgtaccccctctgcagaggttaactaactgttcgaacagccgtgcgcacggtcatgagcggatgtgaggttgttcccgttgcgtagacttgtttgccagtgttttgtgaaaagttgttgtggtgtgggaatcgtaaccagaatcagcctatgtggcagatggatgacctgagtggtcagaaacgaatctgtgtgattcgggatgtctgcgggcatcatagactaggcttcctgagtggaagcggattgttgtgctgctgggcagctggactctgggagtccgagaaaatgaaaaaaaaggttctgggagccgcttaatcaagtgaaatggctctgggagccgagaagtaatgatccgacccgggtggtcagtacattaccatttgagttgttgaaaagcatctcttaaagtcgaatcgagacgcaagtctcttttcggcccaaacttagaaagaaataaatcacttagtgatttcaaaacgatttcaaaacaaaggatttgtaaaacaaccttgcctctcttccaagcttgcattaaacacctaagttcccttgacttgctgagtacaaaagtactcacccttgccctatataaatatatatagttcctccgtcctgaagttgaagatgaagtgaaatgaagaataggatttcgtcctggttcccagccatcgcctgtggtgttgggtgttagtccgttggttccgctgctgctgctattgttggtgtttccccgtccgcgtcgtcggttgtattctcgggctgtcctgagctgcaacctaagttaaggtaaataagtcctctatttattttaaggatttgcaatgattcatatttgtcaccatgggtaccagcactatgttctgggactgataccgagatcgcggtttcgtaggaaacggttcgcgccctttttcctacaacacgctcctatcaggtattgctagatttggggttcgtcttccttgtattattctcttatttattttccccttattttttggtatgcggttgatttgattttgcttatggaaaactgggtacatgtggattttagttggatggatgatgctgccgagatttacatcttcatgtttaacactttacgtagcagtaatcatctagagcaaatcacttgtttttcttctcaggtagctgcgacaaaccaaacaagcacaacctcaggccgcctgaccagatcgtgttcctgaacttctcgtatgcctatcaggcatggaaattctcgcttgatgtgaccatggctaatatggatataatcattgctggatcaacaagaagacatcaaaatctagtcctccaagtattggaaatcgatttggccacctactatattgatgacttcaaatggccgtcaaatctgcatacgagctccatttttggcctgtgggtacttgatggaaagatttcggagttcactttcaaatgaatcaagcctcattgtcaaattccattctagtcatctgcaattgaagaaacaatgtgttgcgtcaactgtcatgggcctttggacttctaactttgtttgggaccccggcccaagtgggacccatgtggggtgccccccaaacaggtggagcatgaccctaggaacccctaggtcatcctcccaactccttaaatagctaggtaccccttcagggtttcttgaattttgtttagattaaagtttagccattgctacttgcttgcagcgcgcgtgtcaactagaccgtccctctgcttgtcttcgggaccccaacttatcatgtttattcaatttctatttgcaatatttagattgctttatcttgttcttgcttgtttctttgatttgcttgcaggaataagattgatttccatcaacaatatcaacaacccacggagatgtgtatcgatcgctaagtgttaacagcagaatttcgccgtcgtgttttccatcagcactaaggcgcaacacaacaacgtcttgtatggatgtagtcagatcgttaatgtttctcccaaatcatagttatcatcaactcactgaaagatcgggccaatcatagccgtgagcgtatcgagtggcgctcagggtttatcatcacctctaacgggtttgacactgatcagaaatgagtggtcattgatgactccactcacctttgacaggtctcggcccgttagaggtgacagtcacctctaacgggttataccatgtaacttgtcccaaatcgagagaattatctgaggaacttagttttatttgcaaaatcatttgaaaacttccggaataagagttaggcaaaggatgagataatagtactctatgatctgttatatccctcaaccacccaaggtgaagagaagcatgtgttctgacatgggattgggtgtaagggtaagccaccgtgcctacttgcttaatacgagagagagtactcaaactttgcacctgtacattctagatatataacatagtagcaactcctgatcaacaaaccaagtttaattgttctgagtcctttactcgggacgagcaaaggttcaagcttggggggtttgttgacggtcgttataggtcaatttcgatcgtcaatataactaaaataaaggagaactggctatgcttgcaatccatatttgttttagaataatctatttccacttgtacttggattatatctatctgcaggtaaagagatacaaaatggaggagaaccggcagcaaaacacccgaacaattaatcagatgtgttgagaatcagacttatggacaaatgggccagaaactcagaattgacatgatcaagtgggcccataattcactaatctggactaaggaacaatcggggagtcagcctgccaaaattgggccaggttggcccagcccatggttcggccgaacctctctgggcgccgtttgatccagggctttgatcggacggtggggattcactcccaatggcggttagagggtattaccgacctttccaaccgccacaaccgtcattcttcagctataaaaggccttcacctcctccactccttcacacactcaagcaagctcaattatctcttctacactttagtttagtattctagtgctaagtggagtagaacgtgctaagtggagtagaatagaatagcatctcggagtcctcggagtctttggagaaatttcggtatggttgtaatagctttccttctttcttttgtaagactttcagaattaatgaaatattcttcttcgtattctctcgacactttagttcatctaagtattgtctttactttatatctgtatcgctacagtcgtatagttagccaccaaagaggtgcagtggtgtgggtttaatgtccaattactcggttgctctatgtcatctcgagggatgtaacaaggaggcggcatcggttactcggttcatatttctagtaatgtcgttaagaaatacaacaaggaggcggcggatgtcggtagggcggagggggcagcggccattggtagggggcggaggaggcgactgtcgacagtcgaggcgatgacggcggcggttggcggttggggcagaggaggcgacagtcgtcggtatggtgtggaggaggtgaggatgtggtgtgaagaaggaagagagagagagagagagagagagagagagagagagagagagaggagcttcccaagaatgatcctgattggtggtagcatatgccatggcatatccagagacctggccttcttgatcatcccttagttttccttgccatgccatgccaggatatatataggaggggaatgggataaggatgagaatggagaggctcatgggaggaggggagggaagtgttggtatttattacgaccacagaataatctgcaagcgcacagataacgttgtatccttcacccggcttaggatggaggggatttctatgggttaattatgttaattaaggtaaaacactattaattgctttgggcaccggcatacccttggtctgccaaggagattccagcttacaactctatgatatacccgaacgtggaagattacgaaggacggacagagccatcaccacctgctgcctacctctacaacccatggagcacacaacaagcaaaggtaacctccagcctagataccgcgcctgtgctattgattactaccctaataccgacgtcatatagaagattaaggtactctacctaagcaaaatgatgaacccacaacgatgagaatatatcttacttaaataacaaaagtaaataccaaaggagatcgataatactaacttataaaagaagcatctgttgaggtacaagatcgaagagagtgccgacatctccggcactccttcggaactcccctggaagaatgccgacatcttcggcactccctcataactcccgaagaaaactccgacatttgcggcaatcctttccgagcttcccatcactctcttcatactctactagagcaatgcctaagtatataagtgagttgtactccacttgttggtctaaatagaagagaggagtggaggagctaaatatagtttgagatgacttgagagagtggagatgcttaaggaaatattctccgccaactcctctcaagccttgttgactgtcgttatagaccaatttcgaccgtcaatatatccggaataaaggagaactagcaatgctagcaatgcatattttattagaataatctagttacacttgtacttggaattttatttgaatacaaagatcttcacataaatgcaggagaatcgacggaaaataaaagaacaatcaatcgaagtccgtcgagtggcagatttatggatggatgggctcacaaacccattaaaataactgcaaatgggcccaaccaccatatcactgggctgaggatccatcgagcgacgcaccagagaagacgtgggccgattgggccaggccagggttcggccgaacccccagctgcatcattgatgctccccttccacgtggatgctcctgatcactccccaatgacggttgcgaggcatttctaacatttccaactacaacaaccgtcattggcagcctatttaaggacctcacctcctccattccaaagtactccaagaagtaatcattccaagaagctctctagtttatttacattgttctagtactagtggagtaggaatagaatagtttccttagttcttcaagtcttcaggagatttcgggtatggctctagtagcatttccttcttttgtaaaactttactcattaatgaaatattcttcttattatagtttcggtcatttacttcacttatataattattcgagtactgactttagcttatacttgtttcgatataattatgtagctagcttaccagagatatgcaatgatgtgggtttaatgttcatttccatgattactctatgtcatctgcagagatgtagagtagtatttattaatgtaagcgtggtgcttagattattagatatcgttaaatggttttatatgccatgggtctatataggtgggccactgatggtgacagctcagtacgggtattcctccatgtgcgtatataatactaagacaatttcctagtgtgggtactcctctgtattcattatctgttggatgatcatgatgggttgtcgtaagaaactcggcaaccaagggtggtctctcgatacaccaggagggcacagttagggggtattggttgcataattgtatactagattatattttaatgagagtattctggtttgttccttctatgtgtcaacttattctacccctacattaattaaccctttcaatagactttgatctatacaagtgatataaattattagcatagtactctcttaccatatcttcccttgggattaaataaatacgataccttgaaatactttcgggtgaaatgctacaacggtatatccgtgcgcttgcggatcatatctgtgaccgtaaaatataccgagaatatttcagcgtcattgctgggaattatatttctagtaatgaagttaagaaatatcaacaagcatttttggcgccgttgctgggaaagatatttgattaagagtttactatatgctaataattttatattcaccaatgtatgatcactgtcctttctaggctaaccttgattgttttcgctcttatgtgaaaacaggatagtgcatgactggtttcaacttgtcgaaaaatttccaagataatcccgaaggattctttgggagcatcaaacctcgtgttgtccctccgcagaagactctttcggtagagaaatcagccatcccagcgccaacaactttcaagacaatggctgataagacactctgcgagttcgttgctccatccgctgacagcgtgcctattggaccacgtgtcaacgtggacttcgacctcaagacaggcctaatcactatggcgcaggctagcccgttttgtggcaagccgaacgaggatgctagtgctcatctgtaacaattcctggagatctgtagcacatatacgattaaaggagtcagccaagattccatccaactccgtatgttcccgttctccctccttgggagagcgaaacagtggttttatgccaaccatgctacagttgatacctggaaccaatgctcaatcgtgttccacgcaaaattcttcctgacgggcaaaaccaacgcctttcgtggaagaatttccagctttcagcaaacgaaggatgagacgatcccggaagcatggaaaatactacaggaatatgtcgccacccttttcttttacttttcgatgagttcttgcttcaagtcaaggcatcggctatgatctctaggcaagaggtaacctgtctcgatggcttgtgctatcgggtctattatgttgttttagatgtattagtccttctattgtgaccattgttatcatatatcttagataatctagtcttagtgtctcaatttagtcatatctactgtttctcgatttagggtttatgtcggtatcggctaaattgctttactagattagattagctaaggtatccaccatcctgaaaagtggttaatttctcgattgtttagactttatgcttctttgcatactttgcgatccatcatgcctagccgtgcttagaatcatataaactaacctagaattaatcataattaggaatagtatccgggtttcagccgatcttacctaatatacatgatagcgcatgttttatgatctttttatgtatattttccacttatatagatagattgctttatataaatacatcaagttagattgatctcgcttgaaacttcatacatggtgatcaattgatgtttggtatgtttatatagattaatttatttatctaagtttgtattggagtattagctagtacattatctatctttgctctaaatactgatatgtcagctatttctataataatgtcttaaaacaattgataaaacccaaagagatagtattacaaccgatagagcgtatttagggtttttgatctgattgactatcatattgccgcagccgattaggtttacctgtatcggctaggtcccgacgatacatcatcagccatatcagccgatcagctatcgttcatctaattatgttttttttgtctttcttactggttgcaggatcaaaccaactggcacgctcttgatactcgatgcaagccttgaacctacattagagtggagcaaatctcccaggctgccatgttttccgtcagcacacatgactatatatgggcccgttagtgatgttctttatcaggtctacaatggacccgtttacatatgacgccttacctgtgacgggtcgtatccttgagcctcatccagaatgggctacagtttaacctgttagagatgaggtcactagtgacgggtcactttgacccagacaggtgggtcgtcactgataggctgatatggtgtagtgcgaccaaactgagttagcactatgatagataaagattaatggttaagtaagaacaagtaaaacgagaaaactgttaacacaaaaataactgagttttaattattataaacttgaaaatgaatttctttaatattttagagcaatagtttttacatgaaatgcacaatttagtagtttaaaaaacatgacaatcatatgccacgtgagcaccacgtaggatattgtgagtttcatgtaaaaaccactgctctaaatattaaagaaattcatctttgataagatatccattctggatgaggctcaaggatacgacccgtcacaggtaaggcctcatctgtaaacaggtccattgtagacctgacaaagaacatctctaactggtccatatagacccgtcacaggtgatatcttatatttaacggcaatttgagaccaaaataacacaatttgataagttcgatgacttaaaaatgcattgtgagagttttagaacctggatgacacgaacaaacaagtttagaaaccggcagtaaactttactcaaaagagtaaagtttcgtccataataatgttttttgtgttttgcattatttgtctttgtaaaaaaaattaataaaaataaaatcatctttatttaatcgttttgtgtactttcccaccttttatggaactatggattacttccatctttttttcccattagtacaaattactctttcttttctaaagtttgagtaactcacgctccatcgctcaagacaaatattgtctaacaatccagagctagagcaccgagtttcttaggccatatacgacgaaggtcaatgctatcagttatctcaacatgacatataggatagaatcacacaaaagtcaaaccactcataatggaaaccacgcgaaagtaaattttatgtttcaatctgtaaaatcaaaggtgtttttattattattctgtgatgaataattggcatcggagattattggttttgttatttggaatttatttttgaagtggtttttggagatgattggattttacaggtgaatatacaggtaccattgttatttcatgtgaccggtcagaccgggcaatgtgtgccggtcagaccggccagcccgcggtctgaccggccgactctgtgtcggtttcggtttcgggttgtttgtttggatatccgtgattgtttcatgattatggcttctagatggatactatacgtatgtaatactgttgtttgctactaatgagtcaagttggagatagcttggtctcggaatatggtttctttatttatttcatttgtaggtgactcgatgcctcgggagagtatttgcggtgatggaccgggagtcggcttggggataagacgacgtccgtggtggtcagagatcatgcgggatacttaggctagagttgatgcacgtggttgatggagattccatatggcatacgatggaggtattgtctgcgtatgggatgcggagtcaaatttgaaaggagtccgaatttaatatgattggttatgtaaagtttgtttcttgtactagagggtttcctaatgtgtttaggactcttagtatgagtttggttcgtggctttaggttgcctacctcgggtataaatagagggggagcgtgaggcttcccagtatcgcttttgaaagcaattgagagttgagttttgcgttagggtttcgagtttagtcgaaatttttgtaaggagtgagatataccggcggtcaaaccgacggcaagcggcggtcagaccggcggtggcgagacggtcagaccggcggcggcgacagcaagcggcagctgatctcggcggtcagaccggagatctaatctcgatcagaccgacgaccggcaggacaacttaggtcagatcgtgatccgtcgaattcgatggtaacttttatttccgctaaaagttttcggtttttgggtataccaaccattcacccctccccctttggttggcttagttattgtgattagatcctacacaatccctacttatttgtgtgttagcccttataatataacttattatcaatatttacattttggaccttatgaaaaaaaagtacatgggtaccctcaaccttcacatggttccactgttagcctctcccactgtatatttttctaccccatcctattcgacgagctcgagctacctctccccttcatctaagagagaatccacggcggtagtgaggacagtgagttcctttctctaccgacaagacgtgccacgatagaagtgaggacaaaaaccttccctctctaccgatgagaagggccatgacgggagcgaggacagtgagctccccttcgtcaccggatctggatgcgagctcgtaagatccggctgtcgtgagctagtcggccggtgacgaggccagcatatcaaagggtaatgagctacacggcggctgtcgatctccaacctccaagtgcacccaccttttctcctttcctctctttttccccttccagaccaccttttctaattgaagcttttatttcctctttggactcactcaactcatgtctccaagcagtggcgccgtagtcccttagctcccactgcactgcaacgggcgctcggctctatagatagccatatggcccaaggcccgtggcccggcccaaggcacgccaatttggcccggcccaagcacgacacggcccgacttggggtcatgcccgtgccggcccggcccgacagccgggctgtgcctgggccgcacccttggcacgataggccggcccggcacggcacgaccgaataaaaaaagttgagggacacaaaatatacttaatgaaccatatcagacagggctcaaagatgagaggaatacaaaatagacttattttccagccatatggacccagcccacagagttaagggatgtaaaatagacttattctatggaaaagcacgattaaccgctgtgccttcgggccggcccgacacggcccgagtcatgttgggccatgcctgggccgtgtgtgtggcctgtgggctggcacggcacgacccggagtgtaggtcggaccgtgccagcccgactaacctcggcacggcgggccgtgcttgggccgtgctgcctgtttggccatctatactcggctgcaacatatatgtttataattactgtttatggtggtgtattgggcatgaacgcatggccttattagtggaactagcaaagagaatatattgtggacactaatcactgattaacaggttgcaggctgtgcacgaggaagaggtcatcgtgtgccatgtcaagttgtcaacaaacaagcctagcctggccggttacgttctgaacacagtttcagtgccagtgtacaagacaggtcaccacctttattattatatatacaactgaaaagcaggagtggagttaactattatggtataaaaatattatgttaaactattgagggacgggagtttctctcgttatttacctgttatattttttaaaaaaatatatattaatacgtgatagatcacgctacaaccatataattttaaaataatcttttataagtaaaaaaaatataacacatattcatcgtcaaatttaatactttcgttctaacttataaaagttaaattttatctctattgttatggagtgatatattacatattaatttatttttttataatcacttaaacaacgtgcaaacaacagtagcatattttactatctagtttaaaatagtttcctctactgaaaagtcaaaacgtcacggaaacaacgcacgatgacacgacaatcccctgcatctacggtcgtttacttgtgcgccgtcgccgtcgccgccgccttccacttgccggcgacctcctccagcgcccgccgcgacgacccctccggcgaccacacccgaccacccgcctgctgcagctccctcgcccgccgccgcatgccacgccccttctccccctccatcacctccttcaccgccgccgcgatctcctcacgcgttacaaccgcgccgccgatgacgtcatcctcctcccacgagcgcggccgaacggccacccccacggactcttctaggacgacggcgttcaccgtctgctccgcatgcagcggccacgcgatcatcggcacgccggcggccacgctctccagcgtcgagttccacccgcagtgcgacacgaacgccgccgtcgcggggtgcgacagcacgcgcacctgcggcgcccacgccgcgacggcgaggccccggccgctcgtcctctccaagaacccgtcggggagccacgccagtggatcgtcgtggacacggtggtcgtcttcgtcgccggcgcctttcccgaaggcgaaagactcgccgttgaagcttggcatgcgcacaacccagaggaacctgtggccgctcatctccagcccggcggcgagctcgcgcgtctgctcgacggacagcgtgccggcgctcccgaaggagacgaacaccaccgaccctgccggctggagatccagccactccaagcacgccgactcgccggcctcgtcggagctcgaccggacgaacgggcccaccgggtaagccggcgggaacgtccctctctccgccgccttcttgaactcctccacggcggccggctccagctcgtagaaactgttcgccaagaagccggcggcgcggcggtacagccggcctgtcgcgaggagctgcccgtacaccggcgtggtgctgtccctgaaaccgcggggcacctccgcgttccgcagcgacacgccgccgggaagctcgagagggtccgggagggcgcgttgctcgccggcggcagcaccgtcgtgcagctccacggtccggcgcatcaaagatagcgcggcgaggctagtgggtacgaagacgtagcccgggaccccgagctcggcggcgacgggcagcgccgcggcgcagaagatgtccgggacaagcgcggccagcgacgccgcggaccggagcagcgcacggaggttcgggagggagcggtggacgacctcgaacagcgtcctctccagtccggcgtcggcggggaggtcgtcgaggggcaccgccggcagcgtggcggtggcgacggtggccgggagcgaggacagcacggcggagcgcgcgtcggggtgttcgaggtcggcgaaggtgacgagcgtgggcgcgacgccgtggtggtcggcgagccaccgcgccagctcggccagcgggatgaggtggccggcgccggggctggcaagcagcacgacgcgcggcggccgcggcgcgtcggcgtcccgctggtcgtcggcggtgaacgtctccattatttcgtggtatagttggctacttggctggcgacggtttcgtttcctatttcacttggggcgctaagtgacaactatagagctcacgcacgtttgacttgttgcgatagagacagagagagagagaggaacacttcttccctttgatgttacttcagcgagaagaagattgtacacttagagaaagtatattcctccctcacaagatgttactaccagtagtatgagtaccacatttttgcgtgtcaaaaaaaagtccaatttacgtccctcaactatacttgagtttaatcatatctcagaaccgaaaaaccgggtataggttattacccaatttctaaaactggtgtaaattaaattacgtcccttagttgtagccgatttttaatgatgtactagcgcttaagtgtcttttttacttggtctttctcttatgtgacgcttatatatatatatatatatatatatatatatatatatatatatatatgttgcaatagaagaaaaaaattaaaactatcaatgcgaccaatatgtcagtaggtgggcgattagaaaaaattaaaacaaatatgtgggggctacatgtcaatacccatcttctcatccccttgtatcctacccatcttctctcccgagctctcctagcctcctctcagggcccctttaaattggaggaaaaacataggaattttggaggatttcaatcctataggaaaatttcctatgatgccctttgaaataaaggattgaatcatattcaatcctttgaaactcctatggaatggacaaccctatagagattttgtagaaaatttagcaagagattcaacctcttggtaacttttcttttagtctatctctctcaggccccctttgattcaaaggaaattcataggaattttagaggatttcattcctataggaatttttcctacaaagacctttgaatcaaaggaatgaaccctatggaatcatatgaaattcctatggaatgcatcttcccatacaagttttggaggaattttgaggtagaacctcatggaaaaaatcctttgagtctttatctctcctcaaattcctgtgtttttcctgtggtccaatcaaacgatcattcctacgtttttcctatgttttgcaatcctttgttttacacttgcattcctatcagaatcctgtattttttctattcctccgtttttccattcctgtgattcaaaggggccctcatccaattcctgtgtttttcctgcggttcaatcaaacgatcattcatgtgtttttcctgtgttttgtaattcctatcaaaatcctatgattttcatattcctacgttttctcaatcctgcgattcaaaggggttctcattctttcctcggtgttgactcccatcggtataaggccctgagagagacgagtgtgttgcatccatcggcatgagatacaggacgtgggagctaggggtggcggcggcgacagtgctttagctttggctgcactgtagccgctacgctaatgggaggagacgccgaggtggccaggatggatgaggggagacaggagtaggggtggcaatttcccataggaagcggcgacctgacaggtacccgcccctatggattagggtcggctctgctttctcacccgcggggtgggcgggtcggggccctgacaatttccggtgccgaggccatggatagaaaatgacctgtggatgacccgaaatccgccctgaaattaagagaaattatgttcagcacttcacctcggctcctctcgacacctcgatctcctctccggctctccctccatcaagacaaattcccatcttcttttcctttctattcatctgctggtgacctagagtttcgtttgctgcctcctcacggtgttgtagcatgacatctcctatcagtgtcttatctatgccattctcgccagtgtcgcctcctgtatgcttctcggtgtaccgcccactgctgctcgcctcccgccggcttgctgcgtccatgcggtgccccggttgggtgcgggaccccagagggcccgaggcagggcaggggctgatttttccctgctttgaacatcggggatagggcgggtggagaaggcgggagtcagaggcggggctgttcctgtccaacccgggcccgacccaccctgttaccaaccctagacaagagaccaacgagctcgggagagaagatgtgaagataaagaaggcaaggggagaagatgggtgatgacatatgggccctgcatatttgtttgatcttttctaaaccgccacccgctgacatgtgggtctgtcgatgtttgatgtcgcgattccggtatttgcatagtatggggatcgttggtactaggatatacgcgagactgaggtaaaagagacggaggcgaggatttttatacaggttcgagcccctgaattgtcaggtaatagccctacatcctgttggccgaagccggtattgctcttattcaccataatcacaccagtacaatatttggggtagcctatctaactgttgtcgacatggcggtctgaagttctgactcgtagtcgacaacagggtagtcttcctcctcgagttcgtgcccagcgagatcagagataacgctttcgtctctcctgacagtatccggagacaccgtaggggactagccgtgcttatccctgaagtcaatatccggcgtcttgtcttggcatatgttggcttgtatgtcgatcttctgtattgatctattgtttcatgtattctatggtgggtgtgtccattgaggcggtcgtgggtgtgtccattgaggcggtcgtgtcccccctcctcctagggggacttgtatttatacccataggtgtccccttgtccaagtagaactagggaaaccaatatggatacaatccgagtagtccttgtcgtttccatgtagaactctggttgtctttccttatctggaactcctcctatatctgcgggttgtttccgtataggacatggtatgtggtgggtcctgccgagatttagtcaactactatgaggtatgtggtatccataaccctgacagttgcccccgacttcaatgcaaatgaatgagttcatattctcaaccgcagaccttggagtaactattatcgagctcacgtgaccgttctcggtgagttcagagataacgttagacttcctttatcagcctcgtgcgggcacctaaagggtttgtctgagtcaatctctgacgtcaaccaagaaagtacagagcatacgactaagtctcccgtcttgctgtaatcgagaatttggattgaagtcaaaaattttatctcggcgggtacaccatttctttattccgtattccttgtcgagatccaccaaccgttctcgagcgatcgagaaggcgtagaatctgcgatgaatccttgtcaacatttgtcataatcactttagtcgatcttggagtagaaccatagagacatggagtcttcgataatgtcgaatagaattttcagaccaatgttttgtatatgagcgtctactcttttaccgacttcgatcagtcagtttgttgagttatacactctccctagcccccagccttgtcgtcggagaatcgttctcggagaataaggctcttggacctttgacctgcctcggttgaacaagcactgatcctaggctcctagtccccagccgtgaagttggaaaatccatttccgattatacggtttggttaatacgcacggtgagaactcttacacgaccagatcttacatggtctttcgtctctaaaggatccgacaagaccttatccgctctgggcgtccccagccgaagttcccttaggttcctaggaggccttgtcaagacggcgtaaagggacattagaataggtttgaacgctaggtgtctttgtggtaagggatctctgggtaaaacacttggcgatattgtgcacttgatatcaactctgttggagtagaggtaatgggagaatcgctacacctctggtcgagaaccaggtagtagtcgtaactcaaccactagaagtaaatgtacgagagatcgctacgattgactggttgagaaccagtgagtaggtgtctctcgatcatttgaagtcgtggtgcgaggaccgctgtgttattgttgtagtcgtacctcgaccatctgagtttgcggtgcgggagattgctacgtactagttcgaggaccagcgagcgagtagaatcatctctcgaacaccaatggaggttggggtgcgagagattgctacgcactggttcgaggaccagcgagcgattagaatcatctctcgaacactaatggaagttgcggtgcgggagattgctacatactggttctagaaccagcgagcgagtagaatcatctctcgaacaccaatggaagttgcggtgcgggagattgctacgtactggttcgagaaccagcgagcgagtagaatcatctctcgaacaccaatgggagttgcggtgcgggagattgctacgtactggttcgagaaccagcgagcgagtagaatcatctctcaaacaccaatgggagttgcggtgcgagagattgctacgtactggttcgagaaccagcgagcgagtagaatcatctctcaaacaccaatggaagttgcggtgcgagagattgctacgtactggttcgaggaccagcgagcgagtagaatcatctcacgaacaccaatgaaagttgcggtgcgagagagagagtgctacatactagttcgaggaccagcgaacgtgtagaattatctctcgaacaccaatggagacgctaaagttggtttattacatgtgcatctcatgtggccagcatgactcacacacccaacttatagcatatccggatgtccgttcgcaatcatgtcgggtgatcaagccgacggcgttcgcgaggaattatccgttaacaaccttttctcgagtagtccagccatggttggtgctatgagataggtcgtcggtcttcgttggcaggttgggcgcgacgactctgcatatgtcgagatcgctctcgataatgcagtgtactcgaccacaacctactcgagtgctcaattgttcctgaaaaatattttctagaagacaagatatatagcagataatatcaagtatgtactcaaaaaactgcatggatcttttagcattatcaggatataacgagcagatgtaaatatcaggtattatgtaaaccgtaaacaagcatgatttatacagaagaagacagagcgatcccccagcgttaaaccatagttgatttaaaatcggggacacttgcataatagatattgtataaaaaacatgctctaggtattgtacgatctgaaagataggtacgataaattgcatataaattactgtgtacctgtgtagatatataccggatatatctacgaaattagtagatcaattataataattgatataccaattacctgtatcgctgctctcccggagcatactctagatcatcacatctatttttctccagggaacgtgctgccgtgcatgtgttacagagccatcatcgaccatgttgatttctttctgtagatgcatgtgtacgtctgagccttgtatcactagcctgttcacactgatatcggtaaaatatgagttgaccaatcagagcaagcctgcctgtcggttctgatttcccgatattgtgacttgtaggccgaatacaactgcagtccgagtttgtgctacacgcgtcttctggtcgggttagatctcctcacagcaaagtcgtcgagtagttttggagaatccatctcttgaacccatctcgtcgaaatcctgaagcaccaaaatccccctaccttgcacaatctaagtagtccttgtcgtttccatgtagaactctggttgtctttacttatccggaactcctcctatatccgtaggttgtttccgtataggacatggtatgtggtagatcctgctgagatttagtcatctactatgaggtatgtggtatccataaccctgacaaggtcctattgatgttttaattttttatttttcttctagtgccgcataagcgtcacgtgagacgaagatcaagtcaaacaggacatgtagacgccaagtcatctaaaatcacccataatactaccgaggaacgtaatttgcaccagttttagaagttgaggattgaccgatacccggttttacggttgaatgatgcggttgaaactgcacgcgtggttgagggacttacaatgaactttttgaagaaaaaaaatcaacaatagatctatccaaatttgacttataaataaaaatattaaaaaatattgtgaatagtacacactgtttgtagtcaaatttattgttttatttcaactcagtcgatttgatatttttaagtacttttttaagtttgatcaaatttataaaaaaaatacagtggacggtgtaagttaaagaaaaacaaggacggagtagttaaaaaaaactttttcctgttttgttgtttaaatcaattgttctaagctactaaggagtatttgtgattttttaaaaaaatatatatatatctataggaagtagaatattcatttatcttctaatgttagtcgtcgacgatatatctctttttaaccttggtaggagtagttgttatcacgtctttttcaacaatgtagtactacagtagttatctagcccaaaacttgtggaggatacatttaattaaaaatatatgacgtacgtgcagcagccgcaggcggtgcattcactcgacgctcgagcaatcatcgaggctagtaaacaacggaggtgattaggacatcaggccggtctctggccacgtctgagctgagctatgctaccatggggcttttaaaaaattggattaatttgatccgtaccattgtaaatatatctatctattatatattattaaaatagctttaaaattaaacaccacgttcgctgtgggggctagaaattcctacattaatcaaagaaaaagaaaagaagagtccaaatagaaatacaatttaaaattaacaaaaattcagatttaaaaataagcactattgaaaaaagagtccacataagaactcagtgcgaattaattaatgttcagaataaaaaataaaataaaatctaaaattaaaaaaaagttcaaatagaaatacaattttaaataactaaaattcggggttaaaattaaccaatatggaaagaagaattcatattaaaaacccaacacgagtttaacttaaattcagaataaaaaataaaataaaattcgtaattaggaaaaataaaaagaaaaggagagttcaaacagaaatacaatttaaaattaacatgaactcagaattaaaaataagcaatattgaaagaagagtctatataagaatccaatacgaaataaattaaaactcagaataaaaataaaataaaatccgaaattagacaaattaaaagaagagttaagtaggaatataattttgaaacatctgaaatttaaagtaaaaaaatcaaaaaattaaaagaacacagtacgatattaattaaaagtcgaaataaaaaataaaataaattctgaaattacaaaaaaaattaagatttcaactaggaatacaatttataaataactaattggtgataaaaaataaagactattgaaagaaaagaccatctaaaacacgagatgagatttctagaaagtaaaaaatgaattccaatgatagttatgttcgatttttagaatcccaatgacaataaagagtaggcagtggaagggtcgtagaggagtatagtggcagcattcgacggaacttctaaaagttacaaaaaaaaaatccaacgagacaataaactataaaaactacaagttctaattattaaaggtttatgacatccaaaaattacaaggtttacgacaataaagagaagagacagtgggcgagccgtagaggagtataatggtggcgtttgacgcgacatctataaattgtaaaaacgaaatccaacgagaaagtaaactctagaaactataagatctaatttttaaaggttccaaagagaatgaatagaaacagtggtagaatcgaacaagcaaataaagaaggagatggcagaagtaaagaaataaagaaggagatgacagaagtaaaggatagtaactggtgtaacttttaaaaactataaaaatagaaatatggagatgataagttttggtctttcaaagtcttaatataacgatatagtatttaatgtaataaattttaagtaaaatcatattaaaatatatataatttgtgtgggtgctagccgcgcaattgcgcgggccacccagctagttcagataaatattgttacaattcatctatttatagctgtgccactcaaattttataaaattggaactatgccattgccatcacgttctccatcttctttccatctacacgtgggacccacctgtaagattcatcttcttccttccgccctccattatattcttccttatgggcgagacctcgtggatggcgacgtggcgtgagtgagtggtgcgaccgcttgttgctggcacggtgcccgtccaatgcctgcctgcctggaacgtcaggaactgcctgccgcacgtcctgcactcgaacaacgcgggccgcaagcacgtgccctccctcctcccggccgacaacgaaaacgactttgtcgtgttgctgctgttgaggagcacgaggacgcgagccttgccgccgcggcgcagcctgcccccaattccaccgcccatgatgtcgaccatcaccggccgctccacgccgcccatgacaactcacccatggggaagaaataaggtaaggaagggtgaaagtaagaacatgaatccaatgggtgggtcccatatatagatagggaagaagatgaaaatcatgactgggatagcatggttctaatttcgtaaaatctaagtggcacgtgtacgaatatacgaattataataacatttatctgaataaacatatttgcaatgtgacagatcaaattaacccctaaaaacttaggtccgaaattctatgtgatttaatttaagttaatatgtgtttacaggttatacccaacaacagtatatgcatagtatggagaacgttgaaaccaaaatgtacgatgttgatattcgatatgatcccagataaattcataagtgcactgataccgttgtaacatttcactcaggaatattccaagggtatcgtatttgtttttccgcatgaaaggcggcggtgtaaagaatgggtcgatatattcataatcatactgtaattaatacaccatagtctaaaagggataaattataatgatagtttggtagtgtgacacacagaagaatcatatcaataaataaactagctagtgtagagagacagaagaaagctattgtttcatatgtacttatatatttatcatgcttggtcaatacatacatacatggttaggacatagttctagacaccaggcactacaaagatattactccctactattctgccaacgtggttacggctattttaagaactcttatgccatatacccgtatccaaacatttaatcaatctaagcactatgtttacatttgctaaataattcaaatacttccctcgggactccacctcttcggatggataagttagaactagtgcaacccattaagatcattggatcaatgtcgtggtatagatcgagtagcctaaacatagcgtaaacatatagagtatatgaaaaaggtacaaacaactcataagccatataattagcaaaacaatatatgaactatgaatacaagtaagtaaagaagaaagttctattattaaactcatagtcttacaatttacaaagatagtagagtactaaagacatgcctgaatctccgataagactagaaaaccaaaaaactattctaaacccgaactccactaatctaatgagtaatacaaacaaggaatatagattttgcttcttgcgtgtgtgttgtgatgggcagaagtgactcctatttataaccctataatgacggtttggaggtcagttgaggtgggatccacgtataaccataaatgggagctggaaagccaggatgagaggaggcaaaggcgtttcggctgagcccttaggtcggctaacccctgagccccacctcttagttagtactcggactgagaggctgactggtggcccctaaggtcggttcagtgtggaatagctaaaattatgttggtttgagatgagatctgggtcctcaaatccttgtgttctttcctgatttcccggaggtatgtttctttgcatcccggcatattttctccttcactttagtgtatagtccctgcatccagactattctccaacgactagtggaactacattatttgaaactaatatgcggataagaaatgttagttctcttttattttcgaggtaattgaaggtcgaaattggtacttaatggccatcaacaaactcccccaagctaaacatttgctcgtcccgagtaaagataaagtctaggttcggtcaatcaggagttgctattatgttttatttcacatgagtatcatgcgtacaacatatctttctatctagaattgaataagtcggcaataatacttttacctttcctatgttactttttatgggacttttggcttctccttgtctttcatatagcaccattcacttacccttttgttctactttttctctgaagattttaaaaaaactccaaatttctcaaatgatgttctcagatcgctcaatgtgtataatttttcaccaagaaattgtgttgagctactagcttccagcatgaactgaactctttttttttttgactggaagcatggactgaattcttcgagctaggcaagtctccattctatcggaagaccatgaataatggccttcctctgtcggattcaagtttcttcaagaaaaaaaaatacagaaataggttcactgatcaagtaggtatatgaaacatctaagttagattatgttcttatcagggagagggcctgagtgcatgaccctgcaagtggctttaaccagccgatcgtatgctatggtgagccgatgcagctactagtacaggactcattattggtaccggttgaaaaattattataggtgtcggtttcctagccggtatttttatccaactacataaaaatagagattataggtgtcagttgtaatcttcggaaaaaaaacataatattgtaggctggatctaattctcagccccatctgcaatttccccatccacattacaaatctacaaagacataagaacaagtacatcacaaacaattcactgttatcagaccagttgccgttatagattccctgagctgccaccgctatctccttcgagccaccactgccaccatcatcatcttcttctagcccaagagcatgtgctgtcagagctggccggatctggcaagccccaacctcaaggagcccggatctggcagccccagacctccaggcggatgaatctggcgtggctagggagagagctcggaggcggcgaggaggagagggcatcgccgaggagaggaggaggaggaggaggggcggcggacggagaaggaggaggaggcaagcgtgggcgagagagaggaggaaggggagagatatgtgcgagctggagagaggataagaggataaggcacgctaaaatatctcgctcccattccacgctagctcggctgctcgggtcggttagattggtatcggcttttcaaaaagccgacacctatattatattaacggtgtcggttttgaaattagttgatacctataatatattataggtgttgttaatttaaaaaaaatacatatagtattggtactagttttttctttagaacagacacgtatagtacttaaaggtgccggttctatatttattttttatcgcacggaggtggaaaaatgatccagattgattttaaatgaaatggcacatatcagccgatacctatgaggggtatattttttcatcgcacagaggtaaaaaataaatcaagatcggttttaaatgaaccggcacatattagccgatacctatgaggggtgtattttatagtactgagtggattatagctggattttttacaatttgatccttttaaaaaaattattttgtaaatagacccaaaaaaacttatccccaaaatggtccttattggggcgccagagtcgctggcggcgtcatcccgcctatctggtgttgtcctcctgcccccacccacccaccctccccccccccccccccgcggccccccagctctctccttgttcttcgttgttttggtttttcctatagtcccaagaaaagtagattagatttcgaacacttttatcatttatttttttacatcttttatatcctattaaaaaaaggtttgtgttttttttacattcaggtgtcatttcttaaaacaggcataatttctcatacagactcggaatcaggcaaataatatatccacggacatctacagagaaagttacatccgattctacccatcttcgccaggttcgtcgaaattaaaacctccaaattctgcttgcaagattgtatttttgaggcgagaagctttttggtagagctttcgaaaattctacaagtcacatatttcatccatttgagtttattttctctatagttggttcttgtgtgctcctaagtttgaaaacaatatcaaaaaaataaaaataataataaaagttgcacatatctctctcctctacactagagaggagaggaaaaaatggcccgggtgtggggcgaccgccacattggcgtgctcccctgccacctcagcgccgacctaccacggttaggggtgaaaacggtacggaaactttccggatttcgaacctattttcgaaaacggaatctgtcggtcggaatttttcggaaacggaaacgaattcgaaaatattttctcagaaacagaatcagaaatggtaagggaagtttccgtcggaactcggaatcagtcgaaaactttctggaaattttctcggaatttctggaaattttctcgaaattaccagaaattttgtgactgaaataccctgaattcttcttttaagcactaaatagtgaacaccatggtgtttggctgttatttttttaaaaaatatttgttatgcaaatctaaaattacataagaatgtttttttgccctacattgggatttatcaacaacattactcttttaaacatagataatttattcaattggatttatcagtttgaggggttttttattccgataaattttcgttaccgtattcgcgtcggttcattttcgctccgtttccggtttcgataatattcgattccattttcgtatccgggtttccgattccgattctgaaaaaaaatgaaaacgaaaacgataaagatggtttccgtccgtttcacccctagccacggtggcaggaggacggcactagagactttggcaccccgaaaatgactattttttagataagttttttagggtctatttgagaaatgagtttttcaaaaggactaaattatgaaaaatccagtggattatagtgttgccacactaaatgtgatgatactcggataaaattgtttttttccttttttatttgtgtattacctctggtgctaatacaagagacacgtagaaaaactgtaagaaaaaaatacacatgctcaactacagtataatatctaaattaaaactgtgaaaaatgatcaattataacgtgggaaatcgatccctaccacgatcatctatgggccaggtttcagtgcgatgcagaggataggtcaccaatcaataccaacttttatttactcgacgcaaacataagcgtggattttgagctctcgatggtacgttcttcggtgctcgcatgttagtcaaatagttataaaaaaaataaaatttaagaaaatttaagaaaatattagtacgtgatatatctcttcataaacatataactttaaattcaacttctataagttaaaaaagcaaatttaattaaatttgtttttactaacatgtaaaagttaaattttaagtttgagtaaaatgcatcagcggtacacgaacttgtcaggtgggtgcaatctaatacatgaacttgtaaaatgcttgttttggtgtatgaacttatttggtacgtgcaagctaaggctaaaatggcatgactagactgaattttctatgttgaacattataaattataaattaatagatgacgtgcgtgcacatagtagaaaaagttatatttgcaaacttagttttcactttatcttcctttgtgtctatccttgcattactacttgcattatttttgttatgcgatcattacgccttattatatgtttatctttcttagacacatgtttacatagagtttaaatcaacaacaaaattagtaagattaaccttgccgtgtgattttgaccttgttcacacgcaccaaacaagttcatgcatcaaaacgagcgttttacaagtttatgtactagattgcacccacctgacaagttcgtgtaccattgatgcaatttactctttaagtttaaatacattttgtagagtgatatattaatacatttttcttttttaataactatttaagtgatatgtaaacaacgagtagacatcccatcgagagttttgaatagtttccacacaaaaaatacacgctgaaacctttcaaggattgaagcagacagacccgcataactacttacggtacaaatagtgggtaacccgtgggtttgctagtttacctgcatgcatccttacttctgcgccgccgccttccacttgccggcaaccacctccagagcccgccgcgacgacccttccggcgaccacacccgaccggccgcctgttgcagctccctcgcccgccgccgcacgccgtgccccttctccccctccatcacctccttcaccgcgacggcgatctccccacgcctcaccaccgtgccgccgacgtcctcctcccgcgcgcgtggccgcagggccatccccactgactcttccaggacgacggcgttcatcctctgctccgagtgcagcggccacgcgatcatcggcacgccggtggccacgctctccagcgtcgagttccacccgcagtgcgacacgaacgccgccgtcgccgggtgcgacagcacgcgcacctgcggcgcccacgccgcgacggcgaggccccggcctctcgtcctctccaagaacccatcgggcacccatgccagtgggtcttcgtcatggccgccgttccggtgggcgtcgttgaggcttggcatgcgcacgacccagaggaacctgtggccgctcatctccagcccggcggcgagctcgcgcgtctgctccacggacagcacgccgaagctcccgaaggagacgaacaccaccgaccctgccggctggagatccagccactccaagcacgccgactcgccggcctcgtcggagctcgaccggacgaacgggcccaccgggtaagccggcgggaacgtccctttctccgccgccttcttggaatcctccacggcggccggctccagctcgtagaaactgttcgctaggaagccggcggcgccgcggtacagccggcctgtctcgacgagctgcccgtacaccggcgcggtgctgtccctgaacgcctccgggaactccgcggtgcgcagcgacacaccgccgggaagctcgagagggtccgggagggcgtggtactcgccggcggcagcaaagtcgtgcagctccacggtgcggcgcatgagatacagcgcggtgatgctagtggggaagaagatgtagcccgggactccgagctcggcggcgacggacagcgcagcggcgcagaagaagtccgggaccagcgcggccgtggagccgatggaccggagcagcacgcggaggtgcgggagggagcggtggacgacctcgaacagcatcctctccagtccggcgtcggcggggatgtcgtcgaggggcaccgccggcagcgtggcggtggcgacggaggccgggagcgaggacagcacggcggagcgcgcgtccgggttgtcgaggtcggcgaaggtgacgagcgtgggcgcgacgccgtggtggtcggcgagccgccgcgccagctcggccagcgggatgaggtggccggcgccggggctcgccaacagcacgacgtgcggccgcggcgcgtcccgctggtcgtcggcggtgggcggcgctggctccactgctgcgctggtgaagggctccatcgtctcgagttattgcagacggtgtggtgtctgtttctgttcattcatcagacgctagcagcacgacgtctatttattagtccgggcaagtctgacgccacctcctcagggcatgtacgaagatacactcagatataaactctactttatctagagattagaactctacaacagttagagacaatacgatctctaatcattaatgtatctaaatactttttcttgctcttctttcccttctttcaccatcatgcaacaaaatttgctttaataaatgctaagactcaactctgagccattgtcatgcataacaaccatattcatttctctttcttccatgtcatcaagtttacttgtattgcaatatagagagaccactaataaaaaccgttgtatatgctctcatatgaaaaaaaaataaattctgtccaattgatgattcaaatttttcgggattgctaatatttttctagccgaaacacttgtccacttttatagtcgagaccattttttcttttgtgttaaattgctaaacagttggatttgtgataattatttagggatacaaataagaaaattatctagtataaaaattaaaaagtagagttaaaataatattataaaaattggtatgtacacagcttttataaaaattgtagcttttgttagctctgtgtgggttaattcatttattataataaatgaattgagtcgtcgagaagatttctaagccctgagaacatgtgcctttaaattgtagtcgttgacgatgtcttcaccaacaagcttgttggtatctagccaagaattctaggtactccttccatctaaaaaacgaatctagtactgaattttcagattcatagtactaggatgtgtcatatccagtactacattggtttttatgggacggagggagtagctaatcagaagcaagagtactccctcaatccacaagagttgcacatattttatattttagtttttcataaattgctcttatttgttatcattatgtatccaacacttaaatcaagaggtaaattaaatatttcatcagaacccgagaaatcattttaatattcattggttacatgtgtctcacccgtacgaaaaaattatgatttttgcataagttgggttccagacgggcgaaaccgccgcacacgaaaatgagtttccaccgcacagaaaaatcgttattgtagtagtggtggcttaatgagagaagagagaaatagcattaactacacttagtggggataaactatagaagtacataggattacacgggttttaggacatagcacttaaccttaggtattatggctattatgagaaaactacagtattgattatgttgacattgatctttcacgctttcattttctacaataacattttaaatttatgaattttatctatcatataaatgttacatgtaggcaagtaatttttttaaaaaaaaaattgatatatgagtatgtaaaattggtaaacggtgtagttctatgaaaattttagtaccatgatacctatagttatatattatgtgtcaaaatccctctgtttttttaaccataatagggtaggttttataaaatttattattattattattattattattattattattattattattattattattattattattattattattattattattattattattattaaagttcctttttcattacacggtagacacatcactacatacgcaacatcacactcacgtttcactaatgcgccccctaatatatgttttaagagacgaaaaccagcgatacatatctgatctcactaaaattccacctgcatatgcatagtattcgtgagcattaggattttaatccttttagttggtttcatgcactaataactctaccaccacaccactggtagtctccacatggcctcccccaagccctttttcttggtctctcggttcccacgaccatcatatcagtacaaaaaaatgatcagaatcgcggttagaccatcagtaaaagtatttctgatcaaaattaggtttcgaccatcagtaaaaaaaagtgacatcaggtttccacaagtaaattaaaattttactccccacaagttaggagctctatatataatacttgttcaaaagtcagtaatatttttactctcgtatatttatacatcgctctctccgtgtattcatagcaatatttttatgacatcaattttcttaatatatttactcaatctgtctgtctagaaaaaatgagtgaaaatcttcctgccattaaaatacaagtatcaatatctttttacggggcatattaacacatacaaccaagattatggagtattgcattatatatcatatgcatatcaatcgcacaaaatcttgtgtgtgtaaaaaactttagaaccaattaacaagaaggaaaaagaaaaacagaaacgcatctcccatccacgggagtcggaaggagaaaagcagcagatcgagatgcggatggcctgaggtctgaggagcaaaccgtgatgctgcactagcatgcgccaggctccctctactcgacgtacgctgcgtcgcgcgctggccgccgaaggaacgggagatacaggctggagggggccaggggcggatccaacatacgtgcaagggagtcccccttacacccacaaaatctatagataccccctaagtctccattcaatttttttatcatagttgatagatagagatgctaaaggtctcataatagtattttagcatagtttaatactaagattatgtatttatatcggtgtacctggaggcatggcagagacagatcgagcagcagctcctatggaagatgtgggggctgtgtccccgccaacgctgcagccaccgtagggacctgcatgtaaggaggtcttcgtggtggggctagagcacacggcagggctgtctatcgtgcgactgtttagggccccaagccgacaagtgggtagtcccgctatccgtataaaaactatttgctagtctattttttttatggtagtacaaaatttagaaaaaataaataaaagtgggataaacgggataaaaaaagcccacttgcccgcgccgcttgcattcctagatatacggttcatcaccaatcaacctaattagcaggacattgttgctcgtcctaatgtttgatttctacgtggacacaccttatttcatcatggttaaggtttaaactcatgaaaatcatatatataagttttgtaaattcataaaaaaaattattagagataggtatagatatgaaatatattcacaccaaattttaggtccaaactcaacatcatttgagagaaacaaaaataataaattttaggtgaatagtctccttttactttactcgaaatttgtcttttcttgttactccaaataagttaagtttattactatttatttgaaattttcttaaaaatacttagctcgttttcaccggagatatccattactatttgtgatattggttgggtgccactaaaattttctaaaattcgatatgtgccatcgtcgtcacattttcctttcttcttcctcctcctttccttttcttttgttttccttttcttttgttttccgtagcggtttgggttggaactcttgtgggtatcttcgtccccggccccaaagggatgaacggggcaaaatcagtccccataccttgaccggccccccacaacttgacctagaaggccgacattgaggggggcatggggacgaggtggacagcgtgggtgcggcgccgaggcggcggactacaaggaggctcagcaacgaggggcgcaaggatgaggtggatggtagggggcacgacgacgcggcagacgatcaacaaggtggctcaaagatgaccaatgaggtggccggcaacgaggagcgtgaggacgaggcggacaacgaggggccggtcgtagggatgaggcggcgaatgacgagccggcgtggagatgaggcagcggatgatgagggggcgcagcaacgaggcagacaatgagcattggcagagcttctggtatggcaagatatggcgctcgccataccttgattctgttagctagtggcagagtacatgattagtttcttcaccaattatcttgttttcactccttataattagctgagtatataagcgttggttgttagttagttgtagaggtgaaaacggatcagataatatccaatctgatccgttccgaatattcgtctgaaacgagaatatggtatgggcttttagaactctggcggatgcggatgcggatacagatatggtatctctaaaatccggcggatgcggattatccgataggtcgttttctggataatcctaaattatcaacacatgtagccactctatatattgcatagagcataagctggttcatccactggcctaattcatcaattaacctatatttcttagtatgaggcttttaccgtctcatgttacacttgcgtagctgtatttttatattatggacatcatatattcatgttgtttagcacttaagcatataattattacgatgggtcatttattgattgttgtattattgttccttgcattgctaactcgatgttgtattgattgcatgcactcgtaacatccgataaatttaatccgtttcctaaccgactccacactatttccgacatccaaaacaatcctctccatctctgcatccgtatactatccacacccgctccaaatccgtttaataaatatggtttaggatatggtatgaccactatccgtccaaatccgctctgtttttacccttagttagttgcatgaagcaaacaccaatgtcggttattatttttcactccttgtaatgaagtgattatataactagttgggcggaccgcacaattgcgtggctagcatcaatttaaaattatctattttttacacatgattttatttgaaattatcattcccgtgattctaataattttatagtttttaaaagccacgtcagtcgctaccccttactcctttgtcacctttttatttgcttactcaatttaccactacttctattcatcctctttaaaactttaaaaaattaggccttatagtttttagagttcattgccttgttgggtttcgttttcataattttagaagtatcgccaatttttagagttcattgtcttttgtcttatttttctttttctatattctgattttattttattttttgtttcaaattttaattaatctcatgttgtgttctacatagattattcttttaatattttttatttccaatttcatttgtttcaaaattttattcctacttgaactctctattttattttttttctaattttggattttatttgattttttattttgaatttaattaatatcgtattggtctcttatatggactcttttttcaatattacttatttttaatttcgaattttatttattttcaaattgtattcctgcgtgaactcttcttttattttatttttttctaattttggattttattttacttttattccaaattttaattcatctcatattgggttcttgtatctttcgatattccttatttctttaattgcgaattttagttatatttaaattgtatacctacttggactcttcttttttttctaattttagaattttgattaattttgtattgggttcctatgcagactcttctttcaatattgcttacttttaattccgaatttcagctatttttatattatatttctacttggactcttcttttctttttctctgattaatgtggaaatttctagccccacaacgaacgtggtgtcttttttgaagactgctttttaataatataatagatagatagatatattgttagctagttacatgatgcaacctgattaaggttcaatctatcagtttggcaatttctatctttctaaaataatttgaaatttgaacaggatttggtcaaatttggatagattttgctaaattcataatttctttttgaaatctccagaaatttggaaattttctttaggaattttaaaccacgaaacagataaatacgatttattatatcaaaacaatttatgcgaaaacttttagggatgtttaggagcacattgcaaatctactattttgcctagtgctatattgttttttttttgttgttgttgttgctgctacaccgtgtatttttttctcgtcctccgctactcactgcgagggggcttggcgacaggggcgcggtgccgccgctgcccgtgcacatcggcggtatcccatccctagccccatcagggaaattgccactcctaggccttatttagttctcaattttttttcctaaaaacgtcatattgaatctttagtcatatgcatagagcattaaatatagataaaatgataaactaattgtacagtttacatggaaatcaagagacgaatcttttgagcctaattcgtccatgattagcaataagtgctacagtaatccacatgtgctaatgatgaattaattaggcttaataaattcgtctcgcggtttccagacgagttatgaaattagttttttcattcgtatccgaaaaccctttccgacatccaatcaaacgttcgatgtgacacccaaaaattttcttttcgcgaactaaacaaggccctagttttctccattgaccatgcggaggccggcgtgcgagaagtgtcggtggcgacctagctctaccatcctagccgccgccttgggtgggagagcgacgatgtcacaccccaatctgacaccgccgtacaacggcacctgataggagcgtgtcgtaggaaaaacggcgcgaaccgctccctacgaaaccgcgatctcagtaccaatcccaggacatagcgctggtacccacggtgacaaatatgaatcattgcaatccttaaaataaatagatgacttatttaccttaacttaggttgcagctcaggacagcccgagaatacaaccgatgacgcggacgaggaaacaccaacagcagcagcagcagcggaaccaacggtctaacacccaacaccacaggcgacggctgggaaccaggatgaaaccctaatcttcactttatttcatcttcaacttccgggcggaggaactatatatatatttatatagagcaagggtgagtacttttgtactcagcaagtgacgggaatttaggtgtttaatgcaagcttggaagagaggcaaggttgtttttgcaaatcttttgttttgaaatcattttgaaatcactaagtgatttatttctttctaagtttgggctgaaaagagacttgcgtctcgattcgactttaagagatgtttttcaatagctcatttggtaatgtaccgacctcccgggtcagatcattacttctcggctcccagagccatttcacttgattaatcggctcccagagcctttttcattttctcggactcccagagtccagctgcccagcagcacaacaatccgcttctactcgggaagcctagtctatgatgcccatagacatcccgaatcacacagatttgtttcttgaccactcaggtcatccatctgccacataggctgattctggtaacgattcccacaccacaacaacttttcacaaagcacaggcaaacaaatctacgctacaggaaacacctcacatccgcccatgaccgtgggcacggctgttcgaacagttagttaacctctgcagaggggggtacactttacacacacgacattactaacccggatcacccagcccgtgagatcagtcacgtcgggagaccttaaggctttcatgacaagacatttcgatagccgacacaggttcaccatatgccaacgagaggggtcccagaccaacaccagattaggtcccagaccatactgtgccaggaagcccgagggttctccacatgtctcttggcatcatggctcccccgattagctaattactcagccaggggcgtcccattgcacccgtgtggtcgcacttgttatatgctcggatgaatttcccacaggaatcggtccttatatgcgaatacgggacagtgccacacaggcacaacccccgcatcgcgagttttcacaatccattttattttcaaacacgccgacaccacatgtcgggttttcaaggcttctcaaatccatttcccaaggcgagggaggaggcctggcggccaatccgacggctcacggcgtgcggcgagttccggcgagcggcggcgaaccggagtgggcggcgggctccagaagtgagagggggtcaaggcgggatgattcaacggtgcggatgagggagaggcggcgacacggcggctggcgacggcggccgtgcggcggcgggatgggtggcacggcgcggccgtagtcggcgaggcgggcggccgtggtggcgcgccggggaggttcaagaggacatggggtgggtcacggcgcaaggaatcggcgagagaagggccgacggcggcggattgcggcggcggccatcgccggcggagataaggggaaaatctcgccggggcaacgggagtccaattcaccggggaaggagcttctacacggctccgggaactcgtttcaagccacgggcggcgacgagctagcctagggagtcatggcgccagcgagcgacctccagggcagagcaatggtgtgcggtgggctatggcgtgcggcaggaggatggatgcggtggggagctcaccgacgagggaggagcagcgttggcgacgcggagggagtcgtggcgaggtggtcgcgacggcgggacggcacggcaccgagtgggcgcggccggggaagaagagagggagacgagaggatgggggcggcgcggagctcctcgtcgactcctcgtgctcgccggcctcccgggcacgcgcggtggcagaaagagcgacgacggcggcgagcagccaggcggcaggggcggcaatggcgcgtgggtgtgaggcgagcaaaatgggagggatagggaagcggtgtggggttttataggcgccggaaggcttcatgtggaaggaattggggatgtcggtttggagagggcgaaaccgacctcgacggtcaagggggcgaggcagctggcgcgggcggtcaagcggcgcagaggcggacgatggcagtggtcgggcaaaagcgaaggagggaggaagaaaggagctttgcacccttgccactttgggaggaaagaggaagaggggcgtgagcgagagagaagggcacgagctctctgtctcttggttttggaaggaagcgacatggggcatcggggccaggcggctgcgcggcgcaggcgggccagggcggtcggccaccgcgcgtggagcaaaatcgaacagcggcggcgggagggttcaaaccgcggcggcgggaagcagcgggcggtgacgaagatcgaaaggcggcgacgggagatcgacaccacaagagaaaagagagagctctctctctctctctctctctctctctcggccatggtgcacgcgcgagcggcgcatgtgagaaggggagagcggctaggagaaggaagtaggccagggaaggaattcggcccacaaggatttgagggaggcgaagtagacttttactgggagatccggtttggagagaaaaaaaaagagtttggaaatggaatttgaatattttttggagtcgggcgaatatttggtgaagattcaaaggaggcgattgaattttggaatttgatttggagacttgaatcggaattggaatcttgaggtgggcgattttgatggcgacgaggggaacaaagatggagattgaattaagatccatggcatgacttagactcgcacacaaagaactaaattttcgcatataagattttgtcgaattagtttttaacgtctcgcgaaaagcggagcgttacagacgacccctcgttgctctgcaaggtgagtggcagtggggggtcgtcgtctgcgccatctccgtgcagaaggagccagaggccgccggcgacgacaagcccggtgctgttgtttcttcttatcgtcgcctcctcccccatcttatattatgctgatgtttggtgcctagatagtaatggtggtcgtggtcgtcgccggaccaatataagcgctaagagatgcatctacataacgatcaatagtttttttaatatcaagagacagatcaggcggatcggaggttaccttacgtgaaaccatgacttgaggtagcgggacgtgtcttttgataatgccttgattggtcctgatgtattatgtaagaagttccttcaccgcctcccgttgttcttcaaggtcctaccgctcctcctcggttaaatcttccttggtgagcttcttgatcttgctcccagtcatgatggttgataaagatattgcttgattaattttggccatatagctcatagccaaaatccttgaccaaatagattaaaataaggtcttgtataattagcaagtgcacctaacaaatggtatctgatcttttgataatcaaccgtgaggacttaaacaaaaatttggaaattttaatccttcacagtgtaaacgatacaattatgaatcggtagaatcagagatcagctacttcctccgttttacaatgtaagtcattctagtattttccacattcatattaatcttaatgaatctagatagatatatatgtcttgattcattaacatcaatataaatatagaaaatgctagaatgacttacattgtgaaacggagggagtattttttttttggggaatacgtgtgcagtactagctttgactaaatctgactgattgatcctatgaggtttatgcctctagtcttttccttttctttgctttcctctctatcctctcttggcctgtaagactcttattcccgtttctggtaatagaaatgggggcagtaatgccctagttctaaaaaaaaaatctgactgattgatgatttttttttctgttgctgtgtgaaacaaaagaaaacaacgttgccgagccggctgctgctccccctgtgtgaatacagtttgacgtctagccgtggccgaacagaacaattcggctcaaaaacaataatgtcggcggcaacaataattagagtgtagattaatttcggctgtttagcccaaactattgatttgacgaaacggtatcggagtagtttaaaccaaattcggccgcaacatggccgaatagatcgttccccagtgaaatcgtcaaaaattatgttggtaatttttttagaagacaattatgatcgggacacctaaacgccttgcagagtcgccaaccaccccgatctagctaaacgctaaattaagataggttttgtagaaagaaaagctaaaccggctagcggagccgatttagagatcaaaatcagtctctaggccgatttagatcgatatgaggataactacccgtctcgtgggcaaacggaaggttcatgagacaaatctacaaaggggtaatcacactcttgcagcgacggcggacgatttacggcgcaaatcgataaagatggactaaaactagagtaaagtacaaaatatagctaaaataaagataaaagaacgattcgattgtgttcgggggagagattccaatcgaactgaccttgtcccttggtcttgcctcctactagttctcatccacatccaactcgatatataaaccaatggaaacccgaaacatgtcttcctaagaaaggaatcccgagaccccacgaaaacagagtcggtttcggactctactgaactgaccggccacatgctgccggtcagaccggccctcaaaccacagtctgactggcccatacacagcggtcagaccggccctgtggaggaaaccagcgatttttctaaatcttgacaatttttcttaatttgaatctagatgttaaatttaggtgtaaacagttattactccagctatattctccggcgttcacatacctttttttttgtctcatacaaagacaatgtcaacgctttacagttgggttagtgccttgataatttattatgtacatataaaaatataaaattctatagctacgagaaacgtaccaactacgaaggggaccagctagtgacacagcccaccattttgtgtagtctgggactatttttttacgtagccgatatatatatatatatatatatatatatatatatatatatatatatatatatatatatatatatatagtaaatttgtttggtgctccatggtgcccgggcaccattgttgaaattgagtatatacccaattcaaatgagcatgaaactttttcaattatttaggtattaatattaactactttactaactagttgaaagcaagtttgaactgaatttgaacttgtttttgttagattttgattctaggtatatagcatccatacatataattagttaggtatgtaatcatggattgtgaaataaagttaaatttgagttgttttgttgataggtataggtatgaatcgaattcttataactaggtatatactcacaatttgaaaattttgaaaaatttgagtgattttgtgcatttgaaaccatggtgcccgggcaccatggtgccccatatgagtatatatatatatatatatatatatatatatatatatatataatgcgcgcgcacagaattcacaagattaatgaagcaagcgaagagagactctgagcgaggaaacaaaaacaattgaggcgaggaaaataagaatttctttgcgtaatcgataaaccttctcatctcattgaccggagaggaggaagacgagagaagaggaagaagcgaagaagaagatggcggtgtcctggcccgggatggtgcagtggtgggaagaatggcagctccgcgtgctcgcgcttagcagtctcttcctccagtgcttcctcttcgtctccgccaccttccgcaggtaccgcatcccggcactcttcaggacatgcatctggctcgcctacctgggctccgatgctctggcgatctacggcctcgccaccctcttcaaccgccacaggaagcccgcgccgggggcggtggccgccgccggcggcaccagcaacggccacgggagatcttccatgctggaggtgttgtgggcgcccgtcttcctcatccacctcggcgggcaggacacaataaccgcgtacaacatcgaggacaacgagctgtgggcgcggcacgcggtggccatgtcgtctcaggccgctgtgtccgtctacgtgttctgtaggtcatggtccggcgggaaggtgccggtgcgctgcccggtggcgctgttcgtagccgggttccttaaaatgggtcatagactgtgggctctgcggcgagccagcattacgtggcacgcaaccgtgagctctgaccgtcggagccggaggaagacgacggcggaggaggaaggaggcgacatgtcgttagagaactacatacggcaggcaagagaacaagccgccaccaggaacatcgacgacgcggtgaacatcaacgacgacggcgaggctcgtcgggcggcccgccgccgtagccgcgagcagcgggcacagttgcttgcacccaatatcctagaggagctcatggagctgttcatagatttccccgcaccctacgctcgccggattggctacctcacgtccttcatggcgctcgaaaactacgacgcctactacaacctgtgcaatcttctggatttagcattccagttcttctacaccaagaagaacaccaactacaccatcgtcggcatcttcctgtgggtactcttcttcctgctgggaatcacggccgtcgcgggcttcgacgggcttgacagcaacaaggacggacttgacagggacgatgtcaaggtaacctacatccttctgtgctctgccatcgtgatggaattcagttcccttgtttggctgaacgactggaactgggtgccattgtggatgctagcaccagaaatgcaccgcactatcgtgcagttcaacctcatcggcttcgctgcccgcagccgatggccaacaatggtgatgtggatcgctacgttgttggggtgcaagaactatgtcaaccaacactggtatcttgaacatcgttcctcaacagcaaagatcataggtttcatccgcaaggacctgacatccggttgggttagcctacgcagcgtcgccgaccaccggagattcaatgaccggcgaggccattggactctccggcgggagcaatgctacggggagctagggtggagcgtaacggagttgccgttcgacgaggccgtccttgtctggcacatcgccacggccatctgccttcactgcacggatgttccgacggctgctgaagatgccgacggcgccagcgcggcggcgcgctccatggaaatatccaactacatgatgtacttgctcctgttccagccggacatgctgatgcccggcacccaacagagcctgttcaccgtggcctgccgcgagatcaggcgtgccttgagaaaccagaggcagcaggagaagctcagcgagagagagcttgcacgttggctcctcttcagcgtcgacgagcccaccacggccgctgcagagcaaggaggaggaggaggaggaggagaaggccggcatctagcaaatgcgcgcaggctcgccggagcgatgatggagctggacgctgacaggagactaagggtcatcggcggggtgtgggtggagatgatatgctactccgcgagcagatgcagggggttcctgcacagcaagagcatgggcgtcggcggggagttcctcaccgtcgtctggctcctgcttcaccggatgggcatggaggggttggccgacaagctccagaggccagagcttactactggagacgtgcaggatgctgttgttgtgtaacctatatatacgtatgatcatatacacctgtacgtacaagtgtggagttttgcagtgtcacttggctctttggatagtcgttgcacgttgctttggtatgcacttggatggattatgtgacaatgagttgtgttcatctatcagcatggttcgaatcttattagttggtttagttactggtacaaacattttttccttagacaatggtctatagaaagaaatcagtcatctatctacacgtgagtatatatacaagcatagccaaagattataggtatgaccatgcactactacagaaaacctctcattcctgccggttggaaacgattagtataggtgtcatgatttttcaacagacaaccctcaggtgtgccatattaggaaccggcacctttgattgttccaggaatgaaaaaaaaagcagcttgcatcgtctaaaactgagcaaatgcttcaagccaagaacaggtacagaaattgaataaaaaattctcacaaatcctacaagaagaatcatcctaaaaaattacaacataacattcatcacaaaaccacctccaccgccgctgttgagcggaggccgaggcgttgccactcaccaccattgtcaaatccacaagaatacagtgaagggattctttgggagaggacgatggggagaagaggagggatatacctacctgttagaatgccaccgtcattgctcacgcctcacggggaggcggggtcgaagggagcagggccgccgctcaccgtggtctacgccaaccaaagggaggggggagggggagtcgtcgtggtcccgttgaagtggttgaacgtgaagccgttgtacggcgtgatcccagcctccagcaatcctctctccagcactgactgctaaggggccatctctggctggaatccacagggccgtcccgaggggagcgcgaccagcgcgaccgaacagggcccccgatcttcagggggccccaatctcgcatgctcgtcgctcgacgtctgtgcgtctgccgctgtgcgttgtgccgccgcaacgcagcaagcatcaaagtggcaaggcagcaagcaacgcctttgctctccacgccgctacggctgcaaggcagcaagcaagaaggccggctgcaatgcatgcactagcgtatatgtgcactaaatttttattttggtcacaaggtttatgatttatctagtatgcatactaaattaaatactatttttgacatctttatctatatgttcataggtttatatagcatttcaactttcaactaatgtcttctgcaaatcattgaaaattttatttttaggaaacactaagagaattatgctttttaattgaagattatgcgcatatacaattttttttctactctagtttatactgctacaaaatatatcatggggcataagggtgtgcgtttgagaggatggaaaaagagaaatcgagaagatacgtcagtcattagtgcatgattaattgaatattaataattttaaacttgaaaatggattaatattatttttaaagcaacttttcaatatttttataaaaaacgcacggtctatagcagtgcatgaaacatgtgcgcgtaaaaggagagtttttctctctttgtgctgcacgcagcctaagtttttattagttcattttatagcttatgtttagtattcggataagattttcgtacagggcccctaaaattcatgggacggccctggtcctccatccaccgtatgctgccatggtcgccttgaggtcgcgccccagtgttgatgaagttgtcactgcccagcacccataggcacgagttgatcacgctactcttggacacgaaccgctgaaccggcgacgagtggcacatgtcgaacggcgtgtttgcgaagcgtgtcatgttcccggtcaccctgcgcttcagcaggagcatgcagaagcacagcgaaagcgtcgccgcaagcaggcacccaactggagagagtgagaacgggaaagagagagggaggaaaataaaataagagattaggatgactggctgttaattttttatctttttttctcattaacatgtgggtcctatgagcaccaggtaggacaaaacgactttcgaaatcaccgaaagagtcggtttacacgggttttcaaatattgaggagacattatacccgttttacgaatgaaggaagggattcaaccagagcatgaaatgagggaggcaatgtagacttattcctaatgtcaatcaaggacttcgaggatcgagctgtggtccgtgggccgtggatcttccactttgtgcagggcagttacgacgctgctctttcccgcccaaccaaattcccccacgggccccacctcggcgacccctcaccggcggcggcggcggcgcgcgatggagctctcggccgccttcgaggagcgcgtccggcagatggaggacgcccgcaaccaccgcctctccctcctccacgtctctccccctcctcctcctcctccctctcctctccttccccaaaccctagctttccccggcctcaccgcggcgcctcctctcccccgcaggccgagaaggagctccaggcggagaggtcccgcctcctcgacacgaagctcgcctccgcgcgccgtctcgagcgccgccgcctcctcctcgagcgccgcgccgccgacctcgcctcccgcgccctctccgcccgcgccggcatcgacgccgcccgggcccgccgcgtcgccatctcccgcgacctcaggcaagcgcgagcatatgcatcccccacccaaacccctcctccctctcgtttactcaaatttccgcatccgcatcggtgtctgaactctctgacgaattgctcgaattgggggggcgcggttacccaaccccccacagctcggtgaggggcgagatcgaggaggcggagcggagggaggaggagtgggaccgcttctacgaggccaagaggaaggagatggaggagttccaggcgatgtcggggtggttcgaggcagcggcgcgcgacgaagtgcagagcctgagggatttggtatctcaagtaaggtcccaatcctttgccctgataaactattgagcttattgattgtttagttgaactactagtatttgtaacattgtcatttgggtgaacctgatgagctcttgtcttcgttcactgtgccaaaaaattttttccaatggcaactgggcagtcaggcagtggattgaatagatcttgcatggtcactacttaatgtagctagcaccaattgatgtttagaaattgagcgcttttgttggcctgcctgatggaccactgttcgagctcaaagcaatagtctgccattatgtcgaaatgtgtggttcgtcttaaccatttgatcataatctagatggaccatgttgaggtggtattgtgggagggagatttcattcatggttgtctccaaagaataaataatttaaatttctcgcatgccttgaaatgtccctagataggtactttacctgtgaagagataaatagtacattggttaggaatataacaactaatttgatataaattaatttgcttctgattaatttgtttgttactttatatcaccattcagtggtagatgttttatgatgtcaagaaatcaagatgattgacttgctaatatgttctaatccgtgagatgccgagaactaatcaaaatggacaaatgcaggttgtctgtaggccattttggaaatattggataagaacaacactacatttataaaaagaatcgttcctactggatacttttcaaacaattttgtttaattgggctgttgctggcaatgggctaatggctgttcattgacactgtttttttagggtatcttggttgattctctctctctctctctcataaagtagcggtcaattttactggcccatgtcaagataataatacatgagtcatggaccacggtctgccataaccattaacttcacaaacatccaaagagcattaatctgaatttttaaatgacaacctgttcttatataatgtaaaaaaacttctcctttttacaaggcattgctaattggtccattttttaaggtttgcaagataatggtatactccagcggtcaccagtagcaagatatgttctgttataatatactgtttactacctgctgatctgaatcaaccaatagggaaccattactcaagatctcatcaagaacctgcgctaggcagaatattttactatctgccaacgctgtgaatccatacctccatactagtgactgcctgcaacttttaatggtgcagctgaaatcaacgctgcaagagcatcacggcggcgtgatgtacttgaacaacgctgagattactgctgcagaagccaggaagtctgatctcatggccaagaaggcaaaactggacgagagcctggcttcagcacgccagttcagagcactgctgcagcagcagctccagaaatccttcgcctcacagattggggatcaaaagacaacacaaactaccatttgaacttgagaacttcagatagcagcatatctgcatcgactgtacaggtgagaaacattcgagatgttcattcagatagacagatacatgctcttcttgtcttcagttactgttcaattgctccattggaacgatggaagtacgagtttcaatgatgcaaacatactcgccgcatatgcaacaagatctttgcaaagactcatggcttttcatgcatattgcttcctctctttgctaatggattggtagttgtactgatggctgcaaagtgtgcagtgtactctcatcaatgtgtaggcctagtcttcccattatatgctgcccagagtggacgcttttagggttggtacctcccttccagctactcgcaactactcatgcacttgtaccatttagttaaatgcagcacatgagaacctttcatgcaatgccaggcacaaattaatagatagcccacaatgacataatggtgctgtaaattcataaatttgagggaatgaagatatttgctggtatttggttttggtagatcatggactcatggttgtacaggcatgttttaaattcaatagaaaaattattgctaagggtgtgtttagttcacgccaaaattgaaagtttgattgaaattggaacgatgtgacggaaaagttagaagtttgtgtgtgtaggaaagttttgatgtgatggaaaagttgaaagtttgaagaaaaaattgggaactaaaccaggcctaaatgatgatgatactccctcccccctaaattctccttccgatcacaaataagtggcttttttaagacagtgaaagtccctaatacactcgtttaattaccaatcactactacaaaattgtagaaaggataaagcagagtgataaaattttaaaaccaaaaactaatctatccatagcattttttaaagtcaagtcaaaagtatttaaagaaattgatcgaagttcaaacatattaactacgtgtattgtacaacatcacttgtttataatcagatggagtagacccataaaccttttatgtctctcggttattattttctaaatgcataaattaagatgaagattacatatattgaatagtcgttcatcaaatatagccaattttaggtattaaatatctccatgacctcaaccataccaaatgaaacaaggtgacgtgaaaaaaaaactccacttaacgcacacaaacccatagagataacctcatctagacgcttcatacgagacaaaaactggtggaagcaacccccccccccccacgcacaccctgaaccccctttcttcatcaataagacacaccgacgttcaaaccgatgaactcaaacctacgcaccgccaaccaagaaaaaccaaaacctaacacgtggatacaaaatgcaacctggaccccacgtaacccctccacctcactgtacatccagctagagatcatcctacgtagtacatctatcttcaccgcccgcccacccaaaaccgtcacgtctccactgcaatccgcttccgcacgccatatatacaaaagatgctgaccaacacgaaaacatctaaaacatctttaagctaaaaaacatataacaaaaaaaaagttaacaaacatgaaaaacactctcatctcacatctataaaaccacggaaaaaacaggtagtataaagcatagacaaaggtaccaccagcatcctcatccccaccaccctctctgaaatctactactaccaccgctatccccacaagcggctagacaggcagccccccgccccgttgcaaactgcggctatgtggctctggcaccgagattattatagcgaccgcagcagcagcagcagcagcagcagcagaagctaggctacagaggtcgcagtctctctcgcagtcgcagcggcagagacaaggccgctcttctcttctcttcttcctttccttgtgcatagcgtagcggctagctgttgcagcagcagagaggtctccacttccctttcctcccaccccgagaaagccaaaaaaagaaaaattatttttcaaaaaaaaagctcgcctcgccctcgcgtcgtcgtccccatcaccccccctcctccgctccgagtacgcgtgcgtataccaccacctccatctccaccaccgtatgtatctacggtgaggcggcggcggcggaggaggaggaggagggggagtggtgagggtttcatctgcggaggaggagggaggaggagggaggagggtagatctgggagggggatggggaacaggataggggggaggaggaaggcgggggtggaggagaggtacacgaggccgcaggggctgtacgagcacagggacatcgaccagaagaagctccggaagctgatcctcgaggccaagctcgcgccgtgctacatgggcgccgacgacgccgccgccgccgccgacctcgaggagtgccccatctgcttcctggtataaaaccgcctccggggagatgtggcgggtggacgggaggaagagatctctcccctcttcctcacttcctcctcccgcttccttccacttcagctttttctctctttttttttggtgggattttgtcgtaatgctactactagtacttgttgttgcgagagtagggcgtggattgcgtgtggccgggtggtggcgtggagcgtttcgattagggggttgattacttttgctcctgttcgattgtggagagtgccggtggtgtgtggccgttatggagatggatgaccacgcgcagtgttttggggcaagaatttcagtcgacattggcacggttttggggttgtttgtattgttcttggataattagtgcggttcgtggagctgattttgcgaaatgtagtagtagtgtttgaattatttctggtagttagtagtggtatcatacttcgtatgtacattgtccgcaatgttctcctaaattgttttgttttcttaatcatagtttacttacttttattatgtaattctgagatacgtttttttgggataattatagtctaggaggttttgggtactcatttattattgtcaatattctataggcctatctattggctgcctggctgtgatgcattgcatgaaatttaatgtttactgccactcccggggttgggacattacagaccttataggaaatttgactagtttcataaatgaataattggccaactgttctgcaatgttgggtgccttcaatttctaatagtggatgctctatagagtacggaggtaccatggtgatatttgtttgttgtgtgtaatactttatttttggtgtattaatgctcttgggaaccgagattgagaatctattgtagtgaacttgattctgttagctgtgccagagtattttcgatgtctcttgtcaagcctgcatttatttggcacaaagtagattttttaaaaaaaaattctgcagctttaatgctactagcttactgcaattaatgttattactatataggaattttaatgcaattctatatggttgcaattttattgcaattctgcttcattagatctttagctcaaaatcactcaataaatttggttttagatgaaatcatgaaacttgtattataggagtatattatatttggtgttgaattatatgtttgcatttgtgctaatagtggtatttaacaattatcacttctggtatttctgagttcaaactgtttgacaaccactcctgtcctgaaatgcatgttttctttctttgtagtactacccaagtcttaaccgatcaaagtgttgctcaaaagggatatgcaccggtaatacatctatcctataactaacaattgtgttttacttgttaggaccatatacccttatattcaatggttggtttttttgcagagtgctttctccaaatgaaaccaactcacactgctcagcctacacagtatcctttgtgtcacccttgattatattttgtaaccttggcagttggcaatctatattcctttttatgaaaaaaatacttaaccaataaagatgtccattctgcaaaactcccagttatgctgtggagtatcgtggtgtaaagacaaaggaggaaaggagcatagaacaatttgtaagtaatttatattctgatgttttttttttgttttgccaaatgcatttcatttatctcacataatatgtgttacaggaagagcagaaagtcatagaagcacaaatgaggatgcgccagcaagcacttcaagatgaagaagataagatgaaaagaaaacagaacaggtgctcttctagcagaacaatcacaccgaccaaagaagtggagtatagagatatttgcagcacatccttttcaggtctgcacaggctgcaactaacatagaaatttagtaatgtaccatttcttctgcttgatgtggtaatttactatgtgttatgtctgtttcagtgccgtcataccgatgtgctgagcaagaaactgaatgctgttcatcggaaccttcatgctctgcccagactagcatgcgccctttccattctaggcataaccggtatgttattatctttttctctgagttttagggtgtcattgtagcctggttatgttgaactgcaaaccttactacacttctatgttaaataccctacctcaaccatgttgaagggaagcaaatgagaagtattgttaaaataggataaaggaaagtaacagtattatctatagaatcaaatcgataacaaagatcaaccgttggattaaattggatagtggggaccagacaccataaaacactggcatttcggacaagatcatttaattattccactttaagcttgtgcagtctgtcctgatccactgcactatttaagtggatgagaagctgtgattggagttactgttctagtgttaaggttgacttgtatcagatacaattgcctatccagtgacaaagtttgaatgtttaatttgtgaaagtgtgaatggagagaatttctgcccacatcattgttgtaccatgatagttacagtaatctttagtttatctatactctagagggataaaaacaccaaaacagtttgatcaaaattgttcgaggtaaatcctaagtataaaattgagaatggatttgtttttcaatatggttatttgttatcgacattcagtgtttttatttcacacaatggccaattccgaaaaaacaatctgggttctttttatcccactgtccataccaagttgatgtagcaagtaactactacacaaaatagtatattgtagccctttacatgcatccaatagattaagtggtcttcaatccaaggatgaaataagcaataacgtaggttccgataccaaattagcacaaaacaatgctaaatgcttttagaggaagtaaaccactcatttggttcttttacctataaacttgtgttcgcttgatgttctcaatattgtcaggctattttatagacttgaggagtaaacatttcttgatgacgttatcttctcctattgtgctagacataaaatacagtgtagcataacttgtgtactgtgagtttttttcaagtttttcttgatgctgcacaatagtatacaacaatcgtctattcagtcacacatggcacatcctcacatcaaacagaagttactttttatgatgttaatgtgtagtataacagcagaagctaaacggtagagggatacaggatactcgagtcaatatgaagttggggttccatggagtatttgaatcgaataaaacatcttgatgatcaatattggttttcatattgtttctataagctagtttcatatttttctagagaacctattattattttgcttcctgtcctcctcagaagattgacattctgtactggtagtgaatttgtgtttccctcataccctgtttgggagggtttcaacgtcagcttagtgcagtgctgcaaagtttaaactctatgaccagagcataagtatggcttaaggacttctgatgacaaagccatttttgaaacctgaagcctattttgatcaacttatgaacttatatggaaaaccagtttctgaaagaggccaaatatcaataaatggtgccttaatctcccttcagttttatagtttaccatatggatatttttcctgtactaagtgtttcttgcttgctggtcatgataatcctttatgctgttgagatgaaaatggtttctaaaattatgaaactgtgtgtttccccttacagtgatgataacattgacatgaatatagaggatatgatggttatggaagcgatttggcgttccattcaggttagtagttttctcactggtccttacatgagattattgataatatgcatatggcatactgtggataatattataaaagctgatttgttgggtcaggtaatggtttgtaaatgagctgcacaaaaatagattgttatttgcattgaacatgaaagtttgctaatctcctggcatgcttgttgaattcagagcattttgcgagttctgataaatgcaagatctagtctgcacaagcagaacctgtattgttaagtgttcaataataaaaaaaaatgtcaattaaattgttgagaagtgtattggcgatagtggataatgtaggatatgtttggtttgagggaccaacatcagttagttcatcattgcctcattcctcaggcacatgctagtggaaaaatgagtaatgcagtattcatgccaaaatcatcctagatggtgtgattcctcaaacaaaacaggccagtagatgatggggttggtaagataagttatctttttgtcattttacttgagcagtactgcgcttggcacaaaaatatttctggtcattttgtgagaacaagaggacttttcacattcctgcattcctgaagggaacttattatctaacagcattgctaaactcagctcttcccatgcccttagccatcaaattgatttgttatgatggttgcattgttagttttgcggtcccaattattagccacttaacgttcaggtcaggaactaatggtgttttttttctccgtcctttgtgttatactacctccatcctaaaataagtgcagccatgagtttccgcgcccaactttgatcgtccgttttatttgaaatttttttataattagcatttttgttgttataagatgataaaacatgaatagtactttactcgtgacttatgtttttgattttttcaaaaaaatttcaaataagacgaatggtcaaagttgggcgctgaaaaccatggctgcacttattttgggacggaggtagtatcatttattcatttgctgttcaagctgtagctcatcgtgtactgttccccaataagttgcttgccatttggtctatgtttccagcttctttcttttgtgagcatttttccttctgtatagcttgttactagaaagatgtaaactttatgttaaatgctgcttcatctttgaatttagattcttgggaataaacaataagcaaagttcatgtattgcgtatagaaaagtctgcatatatttctatcctaatacggtcaatcttttctctgagcaggagcagggaagtatagggaatcctgtctgtggcaactttatgcctgtaactgagccatctccgcgtgaacgccagccattcgttccagctgcttctctagaaatacctcatggtggtggattttcctgtgcggttgcggcaatggctgagcaccagccacccagtatggacttctcttacatggctggcagcagcgcattcccagttttcgacatgttccggcgaccatgcaacattgctggtggaagcatgtgtaatctggagagctcaccggagagctggagcgggatagcaccaagctgcagcagggaagtggtaagagaagaaggagagtgctcggctgaccactggtcggagggtgcagaggccggaacaagctacgcgggctcagacatcgtggcagatgccgggaccatgccgcagctgcctttcgccgagaacttcgccatggcgccaagccacttccgcccggagagcatcgaagaacagatgatgttttccatggctctttctttagcagatggtcatggaagaacacactcgcaagggttggcatggttgtaggtagagcactctaattttgacgccttgctgccctctcccttgcgctgctgttgctgcccttctctcccctgcctcctgcttctgcctcctttttgccaccagctcttggcctttttgttcaccccttttttgcatgtgttttgtcgtcatggtttgatatagatccagctatagctctccattgttattgcttatatgtatgtaaaatggaatatgaggaaatagaaaaaaggaaaatgggtcaacagttcttttggcagtaggatgtgaattgtttttttggttgcgaaagcgtatagcatccttcaattcttgcagttggaagcaatgtttgcaggttgcatgtatgtttgtgatttcacatccttattgtgtaagaatgttacacttacagcagccaatggaagagctatctcgatgagaggcgagctgctaccagcattcagccattcatgagccaactcatgctaattgtatgcttttaaattttggggtgtcataatgtttacatattctaattctaaacacaacaattcggtcgttctagacttatccgtgttaaattgtgctttagcaggcaaaaataataattggaaattatactgttcctttttgttacatcgagacaatatttgtgtcatctaaaaaaaagagaagacagtatttgtgtcaactgtcaatggccttgtttggatccttcgggctattaaatagccctccgaaattttgctatttaggattattaaacgtagagtaccgacaaaaccgattccataacctcgaggctattttgcgagatgaatctaatgatgtatattaattcataattagcggctgattactgtagcatcactgtagtaaatcatggattaatataccttgatagattcgtctcgcaaaatagcctagaagttatggaatgagttttatcagtaatctacatttaatattcttaaatagcaagattttggagggctatttaatagcctctccggatccaaagagagccaatgtgcagatatggagacgcttatatgggctatatatggcctgcttacaacactggatggtccacttccagactcttttatgcccatcgaacgaaattaaactgggttgctctatcaagtgaggccagtagcatacttagcgcatgattaattagggcgctttcaggatgagtccgcaacttctccttcccatggagaacgaggtagcttattagtatataattaatttattattagcttaaaaaacttaaataacaaattaacatgatttttaaagcaactttcctatagatttataaaagaaaactacaagtctagcggttcgataagtgtctgcacggaacatgacgaagtagaagtgaggaaaggattgtaccaaactcagcctgtgtttaagagagaaggttgggaacttctctcctatgcacgcaaagcggtggcttattagcataggattaattaagtattagctataaaaaacttgaaaattgaattaatatgatttttaaagcaatttttctctagacttttttaaaagaaaactcacctttagttgttcgggaaacgtgtgtgtggaaaaggtatgtttagaactagaattttattatttttttgaacctctttaatttttaactttaaaaataaaccatcaaaaaacttatttccaatatctaaacattttgcgcatgccatctcgtctgacgtggcaaaacaacactttcacgccacccgctagcgggcatgataattttgtgctggcaaaacaatgctatcacgacagtgtggtcaaaaagtttagatttagatgtgagttttgagtgagtttatttttaaaataaaaaataaaaggtttaaaaatatactccctctatttcataatgtaaaactttttagcattgtccacattcatatatatgttaataaatcaaacacacatatatatttagattcattaatatctatatgaatgtggacaatgctagaaagacttatattatgaaacagaggaagtacatatatatatatatatatatatatatatgtatatatacatatatatatatatatatatatatatatatatatatatatatatatgtatatatatgtatatgtatatatatgtatatatgtatgtatgtatgtatatatgtatgtatgtatatatgtatatatatatatatatacgtatgtgtatatatgtatatatatatgtatatatgtgtatatatgtatatacgtatatgtatatgtatacatacgtatatgtatatgtatatatacgtatatgtatatatatagatatatatatatgtatatatatatatatgtatatatatatatgtatatatatatatatatatatgtatatatatatatatatcttagaactataagttctcaacttctaatttctcgtttttcacgcacacacgctttctaaaatgctaaacaagagtgttctttctatatctatagaaaggttcctttaaagaaatcatattaatttatttttttaatttttataattaatatttaattaatcatacgacaatgaactaccgtctaccgataggagtttctaaccaactctcccgaccacggtattagtatcattccatctacaccttatatttctcgactagacaagttggacatcatcatactttgaaaagaaaagggaaaggagatcccagtgacaaaatcacaaaagcaaaaagggttttagatcaacactgcatttcacccaaaaccacctatgccatcatcgatcagcacctatttccttcatcctaaaaaaaaatctataatgggacttgatattttctggtacaatagatctggatagatactactccctccgtcatataatataagagattttgagtttttgcttgtaacgtttgaccactcgttgtatttaaaatttttttgcaaatataaaaaacgaaaagttgtgcttaaaatacggtagataataaagtaagtcacaaataaaataaataataatttcaaaaaattttgaatacgacgagtggtcaaacgttgcaagaaaaactcaaaatctcttatattatgggacagagggagtacaaaacatcacatcttattttagattgatttttttatgagacgggggagtagctaactagctttagcctatagctacctacctagctactcgatcaaattccagcaggctgctactgcatctcatgatcgatgcaatgtactactactacgtaggagtactgaacacgagcacacggtacgcccactgccgttggcactgcattgccaactttcagaaaaggcagaggcgttaacgacggggacatagtactagccagtctcatcaatggcgtgtactagatcgatcagatgagatgagatcgtctcgcccttttggctttgcatctttccccgttggagaaaccgtccatggcgatgaggacaacaatgtctttggcttcttttctcttcctgaaccgattattctctccgtgcatacaatgcaattgcaaggcaatgcaaaagcatatggcttgggaagacactgatgttgatggtacatcacatgggcttatttggtttgattatttggtcttagtactctgagtactgtgtgcatctttggcttttgtcatcttctgttagctagagtagctactaagtagcccagaataattattattgaagggaagcaaattaaagcgatgtttaatcgatcggttcaaaaagtggatcatgggaaactctcgtacctgatgtcctgagatctaagctttctgttcaccttaaagcccttggaatgctagaattttttttctcaatttgtaaccaattcctatgaaattgtagtgtgtaaatcatgtgaaaaaaataatggaaaccctgcgtgttgcagtggatagttaaaaatatcggaaagagaacatgaaaaaaataattttgtaaatcgtatatcctactacttaaaatacaatattttaagctatatagtatttgattaagaattgtaattgtacatgacatgtggatgtatgggatccaattgctattactacctccgtcccaaaatataataacttttggctataaatctggacacataattgtccagattcatagctaaaaatgcttatattttaggacagacggagtaactttctactaggtgcgatggtctagtgcatattgagctttatttgccataactataataagtgcatgtaaatacacataacatatggatggttgagatcaaagcataacatggaaagtcaactatttttttaaaatgatttggctcaatacatgtaaggttttagtttcaactatataggctatatagattatgtctaagggggtagtgttgacaaaggacaacttagctaggagaaaatggaaatggtagtttgagatgttgtttatgtatgaaaaatgagaccattcaacatcttttttaatggagtgtcactttgtaaaatttctttggagagctgttcaggtttcatctggtttataccttccacatagtatatgtcttatatgcaggttcttttcagggcaacatattgactacggtcctgggcacaactacaaaagtatgatgaagactgcaagcttttgaagactacatgtcgtaatcttgagacgacaattatgcagctttttgtcaacttcggatggagattcacaaatagaattcaataattgtgtgctctttatcttgtgttggcatttatgagtctgtgttggctttatgtttggaagagttttttttaagttctctttgatttgcactcgttttgagtgatttggtgtaataattggctgtaattcgtttgagcaaaggccgggatggatttctattctgttattagaaaaagattatgtctccaaaaggaacaaaacgatgaaaagtttgccacatcttgtgcatggcccctttacctttgagtttcttcatgccctcctcctctcaaaaccatgcaaaaaagaaaaaaaaaagcaaaatagttttggtctcttatcagttggtgcaaggcagcatttcggtcgcatttataactaattatttttttagtgataggcgatgtactggtcgataacgaaacacctatggtgacttcgtcgatcacaaaatacaacggtccagtcagtggcggagccaaaaatcatcaaaacctaggtttaactagtgggttatagttttattttaattctgaattgtagaatacgagaatttaaacatgattacgaaggcaaggccctaggcttgcctcgcctcacctcttggtcgatctttgaaggcgttcattgtgtatttatatggataatcgtcttatagcactatgtttcgagagaaacacccatgggtttttcggctagttacacaaggtggtgggctagccgatctgggttcgaagcctcacctcttctaattatttgatattaggtaattccctaacattcgcgtttttttatactaagtttaaaaaaaatgcaacaattttctaattccattattacaaaatagaatttttattcgttccctaaaagtacagtactagtaactactaaaagtacagtactagtaactactagttggataggaaagttggaacctactgatgacggctttcagctgaagctcccctctaccacaatccacacagaagctgaagccttttataaaaagctactccatgtattattcaagcttcctggttaagctcatgaaaaaaaaaacttcctatgcaagacccaaccatgtggagatggatagatcagctgtcctcttctcaatttgttaatctcttttttttttctctcgcgtaaacagcaagcgtcaacggcattgaagcctccaaataaattattttgcagtttgattagtactatagattttttttaggtggactaatcggaggtgcccacaaatcacaatatgctttggggaatcttttgcaattattcccctgtttgaccccccatcaacgtcattcgtggaccgaagagtttaatactccctccctccgtcccataatataagggattttaagattttgtttgcactgtttgaccactcgtcttattcaaaaaatttagaattattatttattttttttgatttgctttattatccaaagtactttaaacacaacttttcgttttttatatttgcataaattttttaaataagacgagtagttattacgagaaaaaactcaaggtcccttgtgtattatggaacggaggaagtaagttaatttcatccacaccggatgagtccgaagctgccaagaaattgctagagctacagcaacgtgatatgtatccagcagcccttgttgactagtaccactgttttggagatggttatggtgtggaaattctctctgctcgtctttgcgcatctaattaaccgatgtgtagttttattttattttaactatagttttgttgttatatatgtcttggctttattttatgcaagtttcaatgttttttcatgtattttctaaaaaaacaaatcatgacttgttagtttatttcatatttaggttagaacaattaattgttctactttttgcccaggaaagaagtaactttgtttaagttagtaataatggagtaagataaatgaattgaaatttttgaaaattttagtcgtccgaaatctagatactccctagattttaacatttcctttttgtgggaaagctgctcatacgcatcattttttggttccaaaggaccttaacagttttagcttcaaacccaaaacactactaccctggtttggtaaatttttagcttgatgtttatacaattatctccttgaaatgccgacttccgactaaaaggattataaaaattgaactcattttttttcgaaagtgtttcaactttcaaccaaatgtgtcgatttttacgaggtattccaccttttctcataccagaacttggttggggttggggtgtgtgtgtacaatttgctgaatatgtatggggtgcgtgtatataatttggtagcatggctccatcttgattctctggcctccaccactgttgcttgtcatcgggtgatgtttgcaggataacaactggaacagttaggggcagaggccagagactggtgaggcagcagggaggtgatgccggtgatgagtcaactcacattagctataaatacaagatattctaagataggttgtgtgtatagatctaaagtttggatccaaacttcagtcattttccaacacattaacctgtcatataaacataacttttcagtcacatcatctttaattttaaccaaaatccaaactttgcgctgactaaacacagacagccatagtttaaaattgaggtaaaattgttttgatgtcctgagatatttcttgataggaaaatatcacatctagcaatttaactagtattagtgagtactaaatgcaatgaccaaatggattgggaaagttatacatcaaaatcctttatactaggtgaaagcttgcgttgttgcaggagtttagtatgataacaataagtagaaataatatataggaaaaaatacgaattacccttccccgaactatcgcggtcgactgaattacctccccaaaccacaaaaccggacattactcacccccaactatgcaaaccggacgaattacccctggaccccaatccacggtggttttgatctacgtggcgtacgcgtggtagtccagtcagcattccattcattaaaaaatgtgggacccactctcttctctctctcgcgcgcgcacagcggcgaggacggcggcacacacggcgcggcggcgcgtacgcacgtggccgggggccggaggcggcggcgaggacagcggcacgtacgcggtggcgaggacggcggcacgccccgcgcgctccgtcgacctctctggctccatcgacctccaggccgcgctttcccttccttccctttcaccttcccctccatcggatcatctgggaaggcgatgtcctctcaaccgtgctccccacaagttggtctgctcggctcggtgtcgctggctcgttttactggtgacgcacgcctagtgttcgatgtaatgtctcagtgaggtggcctgactgcttgcatgatcgtttttacatgttgttgggcaacgcgatgcatattgggagacgcgtgcgtgcgtgctgctatcctcgccgccgtgcgcatcttagccacgccgccgtcctcgcaaccacccccgcccccggccgcgtgcatgtacgccgccgcaccgtgcgtaccgccatcctcgccgctgtgcgcgtgagatagggaggaagagagagagagggagtgagagagagaagacatagaagagagtgggtcccacatttttaatgaatagaatgctgactggactgccacgcgtacaccacgtaaaccaaaaccaccgcggattgggtccagggggtaattcattcggtttgcatagttggggtgaggaatgtccggtttcgtagtttatggggtaattcggtcgaccgcgatagttcgggggtggtaattcgtactttttcctaatatataagattgctagacgatataagattacataagttgatatggtttatgataatttaaatagtatataaaatgaagattcaaatgtagaagtaaggcaatgtggcattatgtgagaagaaaataagaaagatgatttggaacatagattaatcatccaaatgctaaaaacaactaaggtgatatagcttaacgagagaacaaagtgagggagataacttggactatagattaatcatctaaggactaaaaataattaatgtgatatgatttattgagataagagagaaataacattaagtaagtgatgataaaccatatatgtatataggacattataaaaaaatgatggagagatatattaaaatattatgtgaattatgtgggatgatgattcaacatgcttgtattttaaagttctaaaatttaataaattatataattatagataatatagtatgcttgcatgatgtttaagatataataattattagtggataatgatgtgacatctttgcatgttaagttttaggatttagtatgttgtaactttatactaataagataggatttatggacaaagcttaaacccaaaatctcttatatttgtggacatacagatgtactattaatatttttctagattattagtaaaactcaaaatgtgttgatagaattgtaaacgcaatccatttctatcaaattgattgcaaaacagttatagaatatgctcatattaatagagaatataataggcacccaagtggcaagtgagctcagtaagacataaaacttgattagtagggatagggatgtccataacaaatgtcagtgcttctatggttcccaactactctcagtctcatgtcttcctggttccatttatgtggttctaatttgtggaaatatgcataatctctgctacacaaatacctccatgtataatattacttcatcagtagggctgaacttctattttgcataatatttgtgcaatttccgttatatttaacttcctatgctacaaacatataaatgcaaccctaaatatgatactctctccatttttttataattgaaacgcatattctcctactccagatttgtccaataatattattgttttttacacattaaaaaacatattgctagatctaaatcttgcatcggactttttttctttcgaggggaaacttgtgcgtcggacttaattatcaatgtaaagtcaaagcattttttcggtaaaagagttcccagctattttccataaaaaaagagtttcaagtatttacaaatttattattgtaaaaaagaacatgatcaaagttcataaaaactcaattaatatggtcaattactgaaaatgaaaagggtaacaaaaacaaattataagaaacatgtggaccatcccatcctcaccccctcctcctctctctctcttcctgtgttgcgacttgagacaatgtgtgtgtggattactgtagtactccttctgtcccaaatcataaaacctataatttttcacatggttttcaattacatactttaatcattattttatttcgtatcatgttatcaattattatgatattagtatcacatgaaagtattttaatatacgaatataataatgtaacatacataatatttgatgtagatatttttagtgtaattattagttaaaagttatcgagtttgttttttctgaaaataaggatggcctataatttgggttagagaaagtagcactaatacactatggcttaggctgaatcgtcagattctttttagctactgtcaccatattattactataaattatttcctccacgttttaaaaatacgttttctaaaaagaaaactcaaactctttttccactgttttgcactatatattctcttcctatgttattatgtttatatttttaacaaaatatttaatttatttttacaatcaaacagatataatctactccttcaaacgggcagcagcgcgctgcactgcacacacacaaaaactgacagggtgccctcaaaaagcgagtagaatttgtaggggagcgctgcggtgacatgataacatcatgggggtagtaccgatgcaatagtggtacgtacaaccccctcctttgtttgcatctttttgttcttttgaggtgcccaaaatatgtcgtggtacccccaatgtacagcacacatatgccaccaccaacaccgttcacgggctcgcctctgcagctaggtttagtagtacggccaaaatctcaaatctttccatgcaatttcatcgcaatgcaaagctggtgaaggcccgtttcttcactccccttggttggtacttttagggcatgtttgatacagctccaactcataaatttaacttcaggagttaagtctggagtggagttgtggagctgcctaaactcagcttcacaactctagttcattttgtgagagagctccacccagctccactcccagttttggtggagctgaaactgtttggctgagctccagctccaggaggggtagagttggagctggaggtgtgtcaaacaggcccttactctccatcccaaaaatataaggaatttcagagaaatatgatataccataggacggagaaagtaatagtactccttttacccttagggcatccacaatgtacttcaaaaccagtccatagccaataaaataatacattcagctatctaaccacattgtggaagtagtccataggagagaaatagcaaaagtcatccataagcatatgggctacccatatacaataaaatatgtcatttgtctctatttcctctctcctcctcatactacttactaaccatatacattgtgaatgttacaataattaaagtccacaaatgtgggtcccatctatatggactactttagctatatacattgatgttgcccttaacattagtaacccaatgatgttttatttagcgagtgatatgtaggctcagcatgtatagtaccgtgtttacgcttttattcttgggtgcaaagttaactaaaaacactttaataggaacattcgtgtatatatcataactaatatttaaaagtactcctaagtaattaataacaccacacaaaaagtattttctttagtttctcccatgcttttttattggaatttttagcctgatgagggttttacatatatcaaagagaaaagttgtggtatcaggtggtcaagtgtataagaaactggtcccagcttagatccttttgatgtactatattgagatcatcgtttaaccacgaaccaatcactatttcacatatctgatactgtgtatctttgtatgtactaccgtacaatagttttagcgaccgacaaacctcataaaggtttcagtgacccgtatgattaagattgctaatacacttatatagctgctaaatttttttcaaactatattttcaatcctcacatgattattgcaaataaatgctatatgaaacctagtagagagcgggcaagaagataaaaaatcataacaagaaaaagcattgaaggatatctatagccacccctctctattagcataccaattcccaaacaacaatccatacctaaaaaccacacacaacaaaatagttgaaaacatatctcaaaaaaataactccgaagtttttgtcaaaaactcatccggtcctaaaatataagagatattttaattggttgggacatatcgtagtattacgaatctgaatagaaagcctgtccaagtttataggattaggatatatcccgtcaaactaaaatcctagaacggatggagtgtaaataaagaaaaaaagggcatctctataacaaataagcaaaccgtcaaaaagaaaagaaaacagaaaactggttgatcctcgaaacatcatcgctttttcaataaagtatgactaagatcactaaccaacggcattttctactacactttagaccatatatacctgtcggagtattcacgccggttttgcaattaaaaaaacccaccaaatttgacctaaaatataaggaattttagaagccaccccggtcggatctggacggctggcgtctggcggcgctagctagcgacggtggcggctaacggtggcggctagacggtggtggctagacgggggtgtccgtggcggtggcggtggcgatggtggctgacggtggcggctggcgacggtggtggctgtggcagtggcggtggcggctgtcgacgatggtacctatggcggcgatggttgaaggccatcatccggccgacggtacatcggcggcggcggcggtatgtggaggcggggaaggggtctggcggcaggaaatgaggagtccgggtgcgggcgcgccgtcgacggcgggaacaattgtgggcggtggccttggccgaatcgttgaagggacaatgttgttgaccgacgacgatccttcttgtgcggattggtggtgtgggtttggacagggaatcgcgggcgaaagccttgccgagccatttgaccggctgacaacggcgacgccgtttggcatcgttcccctccttggacgcgttgtttttgcatacccctttcgtttccctaccatattctccgggtgaaaaccttgctttggttccgaacgagcggtggcggtgattcacgtcgtatcctccttgggggcaccgctttgaagaaacctcttcgtgcaaggatattgtcattggtctatgcattggcttcgaactttagtcctaggcctggacgaggtcttctagctccatattttgttttgcttttctcagtttgggtcctctcttctcttgtttggtgtgttcaacttgtcttgaactatactctcttctggagtggatctttgtaataattggttgtagttctttttgagcaaaggccgggatattatattccattatctaaaaaaaatctgacctaaaaaaagaaaagcgagcacacgacgccaaacctcatccctaccgtccattccccgatcggacggccaccaaaaatccaaaaaaaggaaagaaaataaagaaaatccccctcctccccctccctgtctttcccacaagggaagggagagaaaccgaggagaccaagcaaagccaaagggaaaaaaattcgcaaagcgcacacgcccattcgcacacgagacgacgcagcgatcgagcagcgcagcgcacagtagcagcagcagcagccgagcgactgagcgagcgagagagccctactccgcctccgcctccgcctccgccgccgccgctcgccgcggcgcctccctctccggccgccgccgccgccgccgcctgcagcgccgttcgcgtgggcgcctctcgatctctcgaggaaaaaagcggggaggcgcgggcgctgccgcgtccctttttgctgcccggagatccgccccggggtggggcggcggcattccttcgcctggtaaaaccctagactcccttcgattcgggttccccctttgcctcgcgccgcggaggaatcgggcgttttctgcggcgggggttccgctcggtccgggggctccttgcgcgggcggtgttaatccgtttgctcgctgggtcggggtgggtgggggtgggttcgtgcgccgacacctgtagcgggggcgcccgcgtgtggggggaatttgggcgtgggggagttcgcctccccctgcgtggttgggatctgggggattgtagatttcctcattcttttgttaggctagagaactggtagtactattttggcattgatgtggtcaatgtggtgcgcgcgagttaggtcttatgcaacaggatgtttgtggggagatatgggcggaatgtattgcataagattgtggatggatttcagcgctttgcatgaatgtttgggaatgtaatgatacgtttcaggtattctaatgccttcttggctagaaattttgggtatattacagtgaagatgtgactctaccaacttgtccttttttgggtgggtttgagtatttagccattcacagataatttttgtttccaccagtatggtagtgtctggtatagcttcagcttatgtgcttgtaagctcatgtcgtcattctgaagctaccataaaacctttttgcgccctggaaacgccaatcaagctttggcctgagagatcgatcttctaatgcatataaatgaggccccaatagcttgtttgtcaagaagcttaatgttctcatagcccctaaatctttgaatggtttatgttatgattgtcattttccactttcgtgatagtgcaaagtggaaaactctaaacttaatttttgttatgctgcttccgtaggtcaatcagcaatttggaatgatttttcaagctgaagcagagaattatcgaagttggatgataatattctgttagggacatgctccaaccaagggaatccgatgtgcctgtactatttgttgtatttattgtacttccggtgatagcttattttcttcttggaagatggcatgatgctgtaagtaagaaggcacgggtaagtgtgctggcccagcgagctgcagaagaaaccttcaaggtggaaacaatggcgactccagacgttatattgccaggaccttctttaagacccatgccttatatgagatctgcaccttctgcaagacccgaataccatgagtgtgctacttgccacgggcctgctaagactcgctgctccagatgcaagtctgttagatactggtaagatactctgtttctcttctccatcatgtgctgtctattcattataatcaatctgtgtaccaaataaactgtgcccctcgcatgctattgagtattgaaatatggtaactattactcttttatgtccttaatagtaccgtagtaggtatttggaagtggcaatttgactgtatatgactatagcaattctgataaccttaacagctggtatttaaaaaaaaaaagctaaattcagtatttgccactcctcaagttgcccttgcaccacatctctctctatcatgtagcctatccacatctctctctatcatgtagcctatctgattgtgttaattaatgtacatattatgacttttgatgttcaacagctctggaaagtgtcaaataattcactggaggcaaggtcataagcaaacatgtcagcaatggaatggttttggtactagcagctctggtggactacctcctactgagaatactgaacagatgccattcttaagtaacctgaactcacctcttcgagggagcgatgttcatctgcatgacatggatttcgataccatgtcagagccatcctttgtgacaacagatagctataatcttgataccagcccatttctgtcagaccgaagcaacatgaataaaccaaaccaatttctacatacaagtgaaaatggtgctgccattggatcttatgagaagaacgactatagtattgatggagaagtcccttcttctgagattctgtcaggaaataaggtagcttagccaagctcttaactacaattttcttttacaagatttgttttaagtaatccaatccattacattatcttttcagggtttaaataacagttctggttcaggtgaaaactgcggaaaccgtgatgtaatttatcctctcaatagtgtggtacatcaacccaataattatgcccctgaaataagaaagcggcccaaagcaagcatcacggtttatgaatctgataaaggcgtgtatttaacttctgatatgatcagttctggtgaggggccatatgcttctgctgcagagtcactacaaagaagtaactcgtctggaaatgttaccggaaaaggaaacatgatacataagaaaccaccatacccatctggtaaagtgtcatcatcacaaaaatcacaggagaaggtgttgacatcacatcaatatgatgggcatgaaaagaatccccacaacaaaaatgagcaaagttagtgcataatttctttattggataaaatggccttgctttgtcatatggttacttcgttgatctcatatatttactacattttgcaggatctaccaaaacagctgtttcaacaaacagcagtttgcaaggatgcaatggcatctcaaaagcaggagcatcaaaggttgaagccctgaagaagccttcaaaatttctcaaaaccagtctggtgggtttgatcaatgataacaagaggagtaaggtttgaatcatccacaatatatctcgagttagttatttcagagtttctgtatcaaaatgctgagggtattgtttctaaattgacacttcaggtactgttcccatatgaagatcttgttaagttttttcagtatgaagtacggggcatctcacctagaggtcttttcaattgtggaaataggtacttaacattgttcattgagtgttcattgtaatgagttctgcaaataacagaacctaagaatcttaacagaaaatatgactcttgtttcttccattctcatctccatgttctaaacaattgtttgttcgcatgtcactatctgattgttattgctccttttttttgcagttgctatgcaaatgctgttctacaatgtctcatgtgcacaaaacccctgatgatctatctgcttctgagactgcattccaaagactgtaataccaaaactcaagcccccaccctccttggtgtagttgtgaaatctctcaccatctctgatttctttgacattgattgctttattcttttaggttgctcaaagaattggtgcctcatgtgtgaacttgagcaatatgcttcaactttgcgtgaaagtggtggccctgtttctccaagtagaatcctttctaatctgaggaatattggatgtcgcttgggtggtggaagtcaagaagatgctcatgaatttttaaggtgctgtaactgttacatgctacttctagttttcatttgtgattgcttgctaccttttttaggttgttctagtgataagataacttcagtagaagtgggagtaatgcttaggaaaccctgccaaaacttctattccacattattgcttcatcactatcaaaatttattgaaatatttcctcatgtaagagaagcaatttttgcatacacctatcctggagctaaaaggaatcgttgctatttggggtatgcaaaataaaagggcgaacaaatgcgaagaaccatgactcggagggttcctttttcttatttgaacatggccagtcagaagttaatgaaatttctcgactaacttgaaattgatctaaaaagttccaaatctgttttttcttatggcctattttgcttctgatgattatatctttttctttaaaaaagaaagattatatctattgttgacttgtactttagcatagctacctagttattatttgccacataaatggttttttggcatggtaatgtggggttgagagaagcggccactgatgctagtataaccatttactatttcttgctctagccaaaaaataaaaaataaaaatccataatagtatgtgcaatggaacttcatctgttgatattgttgatcacatttacgcgcgcacacacacacacacacactggtgtgcttcagttgaaatttcgtgaagttcacatatttgtccctagccttctttgattggacatgtattaaggggtgcactcagggtgtgcatgtgtgtttgagttttctatgtaacaggagagaaaaaaaaaggaatttctcccattgtccaagtgaataattgattactgtctcccttaaggctgtaatctggaactgtaatgcactaatgtatctgaatatttgagttttaatgtgtccttttctaagaacctcatgctccagtatgttcacgctctatgaaatagattaatgaaaaagggaaattataattgaagtatttggaatctgaaaagagttccattatttgtgaccatgcactcacattatccttgatttgctaaattaccaggcatcttgtgatgtctatgcaaggggcatgcctggatggacttggtggtgagaagcaggtagaagcaagcttgcaggaaactacactgatacagcagatgtttggtggccgtcttaaatcgaaggtaacttaataaattgctgacttctcaggtgtaattttgaagatagctgctagtttgttcagtgtcgtactgtttgttatcctgtgtagttgctgtgaatatgttttccccacttgtaaaaagatgcagtttttccccacttgtaaaaagatgcagttttgtcacttaagatttctcctcttcatgtcaattatcttactagttggctgttcattgtgttttactatgctaactgatttagttaatgaaactaggttaagtgcctcagatgctaccatgaatctgaaagatacgagaatataatggatcttactttggagattcatggttgggtcgagtccttgcaagatgctttgacacaattcactgctcctgaagatttggatggagaaaatatgtataaatgtggaaggtactgttgcaactaatatatttatccatcatttccattggatcacaccatcacaacatattgaacttatcttttaattcttttaatgcaggtgttctgcctatgtcaaagctaggaaacaattaagcgtgcatgaggtgccaaatatattaactgtagttcttaaaagattccaggtactatttgatttcacgccatattgataaattcccagtaattgcttataccaggtctactgtttagctagatattggaagcattttcttgcacatttatgcagtactgtagtttgcatgcgatatttgcgtaactatttgataacatccagttaaaaacgactaatttctattatatgatgtaagcacatttcgggaaaaattgaagcatacaattcgttagctggatcacttgatatacgaattacattggcctatttagctactctgaagagacgctgttgcataattttcccctcaatatgatgaaattaagtgaatattttattgctccagacagggaaatatgggaagatcaacaaatgtgttacttttcctgatatgttggacatggttccgtttgtgactggagctggtgataatcctcctctttacttcttgtatgccgtggttgtacacgtggatacagaaaatgcatcattctctggacattacatatcatatgtcaaagatatgcagggcacatggttgagaattgatgattcagaggtatgtgatacaaaaatgtgaagaaatgtggttctgatgattccttatttaaattaagaacctgtttaggtgttgctttaagaaattacttatgagtttggaccctatagaactgcatatgtctagatttattatggtatcatgagattatcttccagtgggccataatatactctgtactctgtttctcctaatgcagttatggtgttaacttaaactatatattcaattatgtttgcccttgtccttttaattttcaagttcagtttttatccatccatatatctataaaaaaatcactccctccagtcacaaaaggacactgtttttgacttttcaaattaaacaatgcataactttgactacttaattatgctgcataaatcttgaaaagttattcaagtgtaatattatgaaaagtacgacgaacttgagtacatcatttttcatatgctcaaaacctacattttaaacaatacttacggtcaaatttaacttgctttgaccgtacctatcctaaaaaagacattcttttgactggagagagtatttgtacaaagaacaaatgttatatcatatgctgtgtttttttttagaaccatttgaaagtatatgctcacaaattatgctttatgtgtccaaactatcttactgtatgggataaggacaggcaactttcaatttctaggtgttcaatgactataataaaatttcaataccagtacattactattaaaagatgtgacagatgtactagtctatttgatataactagattggtaaaaatgcactattaggatcttggactatggtatatgattgcacagtacgatcctatgggagcatctttgattcaactggaaattctgatcctcacaaagagtgctttgtgtcgagaatttcatgtctttttagcatgtgatatcacgtttcttaggaggctgctatatgtgcatttgaaaatctgaaaatcaaatgagctgatatgataatttggatgaatgtaggtccaggctgtttcactgaatcaagttatgtcagaaggtgcatatatgctgttctacatgaggtatatacgaactgtgatgtctgtggtatctatattatcagataaaattgttctgtgcctgtagcaaactcatatttatgtaaccttcagatcttttcctcgcccaccgaagatttacattgagaagggcctatcatcagttcctacatgttcaaagcgccattcatcaaaatcctccaagggttctaagcaagacctgaatcatactgagtcactctttgcttccagtgatcaaacctatggaatatacgatttcagaccagacaacggctatatacaagatcagcatgctgctttgagaaccagaaatttctatcataccgatgatgcttttgcagattcaattagcacagacttctcagatgctacatcaagcgaatggtcactgtttaccagctctgatgaatcctcatttacgactgaaagcactagagattcattcagtgttgtggactatggtgacaatgctggccttgatccaatttcctctatatttgggccttattatgctcaagaccatcctcctggcagttttgcctcgtgtacaaggttgtcaccttccaatccacaaacaaggtacttccaagagaacacaggctttgtctcagattcttccatgccggctcacctgcccggcaatgtacatagaggaagatatccagacagggcctgttcttcttcagctgaacctcctgcttcagcaaatccgcgaagcgtatatggtaggtatggccttagtagagaaggttttgttcaaacatctggattttgtcaaatgtaattgtctacatttcatagttttagctggagtttggcagttgtggttaccactgccattaaataccgcctcatgttcttttatttcagatgaggcatatttaattttagctgcatatcctaggttagttgagtgagtgactcaatgtagcaggccagcagggtaattagatttgtctaggtgcctagcatttcaggagatatatgttagaacacagtgacaggctttgtgccatccattgttcaaccaaaagccagtcatatcatttatctagttgcacaaaattgtaccaaagagctcagttttgtttgctttcagatttctaacccacggaactctgaaaggagggattccagcactagaacttcaggggaatatctgcaattctcctaaaatttcagcaaaagcagaatgattattaccacacaagcacaagcatcttgttcttctgactttgtttgctgctgctgcgtgtagttactgcgaaccaatcgataagttttgcatcaggcatttgcatcctcgcgagcaaaatacaccaaagttaattaaattaagagtaatggtggagacgattctctggcttcactttgtctcattttctctagaatctctagaaaaaggatagaaaaagaaatgaaaacgaaaatactaataattagaacctaattaattaatcttgagcacaaaccgtacatgggccaaagaataaacaccacaagcccaaaccagcgaagcctgcgccaaaaggccaaccaaagctacacactattccctgtgaaagcccaactaaagcctgcgccaaaagcccaaccaaagctgcaccctcttttgttttaccatttgcctgtaataatgctatttgaggattgaattagtcctggtctcactgaattagctgttagatcactacaaaaaatggaaatgaaaaatctggctatccgtttctggtggacaggatgggcagatgatatctttgacatactaatatctttgagccagttaattaaggcatgcattttctttagggcatgtactttgctcttgaatagtcaatacaagaattggtgaatcaataattaagctcttcttggaaggtccaatcttagtctttaatagtactttagtaggaattcaatatgcttgaccaaaagtgtatgtcctgccccaacgaacacctcatgggaccaaatatgttgaatagtttgtttgcttaactgagaaaaaaaaactctgttcttcctgagcagtgcagatggaacaaaaaggaaaatgccccaaactacacaggatctttctacatatacatgagggcactgcaactttattagaaagaatttactcggtaattttgtggttatgtattacttaaccagtcatgcatttctgttagtggtcatggaatttgtgtctgctattttctctacaagtatttcctgtgcccaactgtgcctgaaactatgaaatacccccacaggatctttctgtgacatcagtgatgatatcatgctgattttgatacctgaattttcagcctcagctttacgcattataaaaacacaagtgccaactgccaagtgcattagtgatgtggcaacagggcatggcattgcattttcttccctctattttcctcttctctttctctctctagcctattctgtttcttctgtcacacattcagtttattctgcaagactggatatgaaaatgatctgaagaagattcatccacacatgactgcccctgatttcaattttcaaatgtcaaacattcaacctaggagaataactggtcagcatatattactctggtctgttcaaactatgctgctttcagatgattcatgcaggatatgaaacgtctgagaagcttattcccagcttgcatgactaggaaacaagttaatttcataaataagttacatcttacatcttttttttcatttaacaagaagcctgatttcattcactctctttgattggaacaggctcattggtatactacaagaattgcctataaaacagatcaatgattgataaaacactgtctatgattatgggccatgatttatggctcaaagcactgactgtttagcatattactttcagatcatagctacttatttcgcccactatcatgatcaaaacaaaggacaaaaaggtcggtctgtctgactacatgaaaccatgtacatgttatgttgccccttgattgtttcatccaggacacaaactggaattgtgttttccaacttatagaaggtgaagagagatttatttattttttaaaaaaatggttgctaatacaagatgctctgaaagtactgttaggaaggcggtcattgtcttcatatccaggattggttataaattaatgtgtctgcctctaggctgccttcgttgttgcattgactttattattggttactgttaagcaatagcctatagcagtctatcctttttaatgatgccactgagtgcccagcttcatgctgtcaacacgaatacaacatgaaaccatggtgtacagagctgaatattctttatggttagaacaatttcttagcataaactttccttgagtcgtcacaccttccacaacaacctaattttagaaatttcacgggtactaagaccctatttgattcagtttagaattattataatatgaattattaggagtatactgaaacaaacaagtaaattactatgataaattattataatttataagctagattagtataatataataatctcctctaaaggagcttttttcagattattgggtagctaaagacccactacccctagatatctcaaatagtatggaaaaataaataactcacagtttattctatattaacttattataatccagcttacattaatctgatttaataatctatattacaataatcttaatttgaaataaacatggcgtaaagctatggcacaatctgtacacacgttgtctcaaaatagttatacgttaagagtagttaatagcccttcaacgcccaaaatttgtattttattgtgccatccaagattccaacccgaaatatcttatacctttaataccaaataacaatatggaagatccggctatgtgcatctagagtttacttctattttatatttattttaaaaaaacaatatcgagacttgttacgtcgatatagtttaaggagatgcaacgcaaggatatatacaatacaagcatcaaaacaacatgaaaaaccactgccatgctaaacaatagaagcaactccatgtactggttgatactccctccataaaaaaaaaaacgaatctagtactgaatgtgacataatctagtataacaaatacggatagatatatgtctagattcataatactagaatatatcacatctattactaggttggttttttatgggattgagggggtataccacaaggaccacagcggattaggcagccactcatgcttggcttgagcttgaagggaccaccctacagtggcatggaggaccagtggccttgcttttagccagtactgtgcccatccctgaatgccatcaacttgcagttgggattgctgatcaagtactaccaccctgcccctcaaatgatccttcagagggcacataaaaattgccttgggatggccaggaccatccattgctccagcagcacagatagaaaggtctctctagttttttttttttttttttttttttttttttttttttttaggtgggggggggggggggggggcagtgtcaaagaggtaggatggaaatggagtgattccagaatatatgccgttttaaagattggtggctggaacaaatgcagattgctttctgattgttaccttcttttatcatctttcgtagataagtataaaggtggatagatgtatatgtgtgtatcctctattttctttaactcagaatgatgtgaacatttcattgtataaacaaaaaggatgggaacaatgataccattcttaggcgcgtccggcggtggaggaggtgaccacggtgcgaggaggagctgccggtgggtgtgacgcggtctacggcgcatgaaggctggccgacggggggcgccggtgcagtggtcctacatgtcggcagagtttgggcggtggtggagcttcggtgcatcagccgttgacttgcaggtggtgagcggcgggtgaaaacccagcccaaccttggtcggacctacaacgatggcgctcgagtgtcatttcccctcctgaggacgttgtcgtgctgtctctctcctcaagggtggttgccgggcgaaagcccagtactggctcttttgagaccttgacggacagcggcggtggttttccgtcgcttctctccttggagacgtcatttaggcatgcccttgccgaaaccactcgagcaattggtgcaagcacactctagatttcatcctcttgtggcggcatcctagtttctacaagttggccacgtcgaaagggcctaggggggagaagtgttccatcttctctctcaccctctctccataaatccggaagacgtggatagagttgggcgctgtgttggttgtaagggcatttttttggacgatctcatatgtattccgttgttggcctagcggcagtcggtcacgcttagcggcggctggtccggtgctagccttctcccggacctgtgtgttggcgttgtaaattgtggctgaaattaatcacctacttaaaagaagatataggagagataacaaaacaaattacagaatccgcctgtaaaatgtgagacgaatttattaagcctaattaatccgtcattagcaaatatttattgtagcaccacattatcatatcatggagtaattagatttaaaagattcgtctcgcaattcacacgcaatatgtgtaattagttatttttttcgtttatatttaatactccatgcatgtgtccaaatattcgatgtgacagggtgaaaaattttactaggggatctaaacagggccatagctagctttgcagttcaaacgtgcgaatctctactattataaaaattgaatatgtttttgccagtattttggtacgtcatccgtgtatgagtcggtttttaagttcatttgcttttggaaatatatatccgtatttgagttggttttaagatctttcacttttggtaatacataaggaatcatataagaaatctatttaaaaaactcgcttactaatttgatacgatcggactcctaattgcagctcatgattttctaaaaatatatatatatgtaagcgaactcttacagtgaattttatcttaactaaaccatataacaataataagattaaaatagactttacccgttacaacgtatggatattttttttctagtaattagaaaaataccggattaaaaaaacaagttggaaaatctctctagatccttctttgcgaggcatggtccccggcgttttccacgagctggacgtactccgtctgacgatcgacctatatcgctattgattccgactcgtgcaattatttggatcgatcatcccttaaaaaaaaaaacgcgagcggtccagtttttcagtttcgtcctcttcagtctcttattcgctagggcaaacacagacagcgatggttcctgtagcacagagcatcaatctctcaactcccctatttcccacgaccctctgtatcagaataagtttgttttttaacactctattcattctaaaataaatttattttaagtaattattgtatcgaaatttataaaaatataaaataaatacattacaaatagataaaagaagaaataatagtattaggatttaagaaagtaaataaagatattttgatattggtataatagaatgcgtaaaatgaacatattttggaacacggattgtctacagacgccacgacgcgccacgtcgcatgcacctgtcgctactgtaccctgcctggctgtccctgtgcctgattaattcttgattaataaattgtccgcagttaattaggtcactttcagagaaggatgagctgcacccagttgataggttttacagtaaatgcactcggcttggtctgaaatcgggcattttttagataatggatatcactccgtcctctccattctaataggtgtactccctccatactcgtactcgtaaagaaagtcgtttagaatagtgacacggtctctaaaacacaattttgacttcttatttctataaaaatatttattaaaaagtgatatatatatatacttttataaaagtatttttcaagacaaatctatacatataatttttatattttcaaactcaagcgtacgatactagtgtttagtgagaaaaattttaactaccaagtatctctaaacagagattttcatttttcgaggtgaacctagggaagaactggcataaagcattgaattatattaacaagaatatatataaaaaagttggtcctataataaacttgatgaaacatgtttgattttattttttagtttttgtaaaaatcgagcattgtttcaccaaatagatcgaacatgtttcactaaatacataaaaaaagtttctgtcaggattatggataccacatacctaatagtagtcgactaaatctcggtaggacccaccacgtaccatgtcctatacggaaacaacctacggatatagaaggagttccacataaggaaagacaaccagagttctacatgtaaacgataaggactactcggattgtatccatattggtttccctagttctacttggacaaggggacacctatgggtataaatacaaggccccctaggaggagaggggatacagacaatcgacatgaccaccacaatcaacacccaccatagacggatcaagacataagatcaacatagaagccaacatacgccaagacaagacgccggatatcgacttcagggataagcatggctagtcccctacggtgtcttcggatactgtcaggagagacgaaagcgttatctctgatctcgccgggcacgaactcgaggaagaagactactctgttgtcgactacgagtcagaccttcagaccgccatgtcgacaacagttagataggctatcccaaatattgtattagtgtgattatggtgaataagagcaatatcggcttcggccaacaggatgtagggttattacctgacaatttaggggtccgaacctgtataaaaatccctgtctgcatcttttttacctcagtctcgcgtataccctagtaccaacgatccccatactatgcaataccggaatcgcgacatcaaacgtcgacagtggcgcgccaggtaggaaatcttttggtgcttcaacgttttgacgagatgggtttaagagatgaattctctgacaatgagctaaatctaacctgatcggagcatatcttccgatgagatcaggactagcgccgccgcggagaaccatgatgtcggaagcagccaaaccctcgacgcgacatcaactggtgcaaggcatcggcaagccgaacccgacaccgattcctaccaaccaagcaagcgtgctgaggagccaaaaatcaactgccggattagtgctaccgtgttctgactaggacacgctttttagtcagtcgacacgggcgtcaactcatcacggccggcgtcaagtccaaccaatttggataacgtcaatatgtgcatgcatcagatcaattaacagcaagtgcatgtgtttactgcatacatgcagctgtacacctgtagaagtaaagattgcatcgatctaatctactccgaatacacatgtcagaaaggtaattagtaggttaattaatttaattgatctactaatttcatagatatatccggcatatatctacaaaggtacgcaatattttatatacaatttaccgtacctacttttcaagatcatacaatattgtcagatcaataatttattatgtttacctagagcgtgttttttatacaatatctattatgcaagtgttcccgatgttaaatcgactacggtctaacgctgggggcttgctttgttctcttctgtataaatcatgtttgtttacggtttacataatgcctgatatttacatctgctcgttatatcctgataatactagaagatccatgcagtttttcgaatacattctcgatattatctgctatatgttttgtcttctagaaaacatttttcaggaacaattgagcactcaagtaggttgtggtcaagtacaccgcattattgagaacaatcttgacaaatgcagagtcgtcgcgcccaacctaccaacgaagaccgatgacctatctcatagcaccggccctggctggactactcgagaaaaggttgttaacggataattcctcgcgaacgccgtcggcttaatcacccgacatgattgcgaacggacatccggatatcctacaagttgggtgtgtgagtcatgctggccacatgagacgcacatgtaataaaccaactctagcacctccattggtgttcgagagatgattctacttgctcgctggttcacgaaccagtacgtagcactctcccgcactgtaaccttcattggtgttcgagagatgattctactcgctcgctggttctcgaaccagtacatagcaatctcctgcaccgcaacctccattggtgttcgtgagatgattctactcgctcgctggttctcgaaccagtacgtagcaatctcccgcaccgcaacctccattggtgttcgagagatgattctactcgctcgctggttctcgaaccagtacgtagcaatctcccccaccgcaacctccattggtgttcgagagatgattctactcgctcgctggttctcgaaccagtacgtagcaatctcccgcaccgcaacctccattggtgttcgagagatgattctactcgctcgctggttctcgaaccagtacgtagcactctcccgcaccgcaaactttcacgacttcaaatgattgagagcacctactcactggttctcaaccagtcaatcgtagcgaactctcgtacatttgcttctagtggttgagttacgactactacctggttctcgaccagcggtgtagcgattctcccactatttccactttaagtggtcaggttacgactactacctggtcctcgaccagaggagtagcgattctcccattacctctacttcaacagagttgatatcaggtgcacaatatcgccaaatgttttacccagagatcccttaccacaaaggacacctagcgttgaaacctatactaatgtccctttacgccgtcttgacaaggcctctgaggaacctaagggaacttcggctggggacgcccagagcggataaggccttgtcggatccttcagagacaaaagaccatgtaagatctggtcgtgtaagagttctcgccatgcgtattaaccaagccgtgtgatcggaaatgggcttttccaacttcacggctgggggctagaatcaatgcttgttcaaccgaggcaggtcaaaggtccaagagccttatcctccgagaacgattctccgacgacaaggctgggggctagggagagtgtataactcaacaaactgactgatcgaagtcggtaaaagagtagacgctcgtatacaaaacattggaaaattctattcgacattgtcgaaaacttcatgtctctatggttctacaccaagatcgaccaagatcgactatggttctattgacaaggctccgtcgcagactctacgcctactcgattactcgagaacggttggtagatctcgacaaggaatacggaatgaagagatggtatacccaccgagataaaatttcttgatttcaatccaaattctcgattacagcaagacgggagacttagtcatatgctctgcactttcttggttgacgtcggagatggactcagacaaaccctttaggtgcctgcacgaggctgataaaggaagtctaacgttatctctgaactcaccgagaacggtcacatgagctcgataacagttaccccaaggtctgcgcgcggttgagaatatgaattcgttcatttgcattgaagtcgggggctactgtcagggttatggataacacatacctaatagtagtcgaccaaatctcggcaggacccatcacgtaccatgtcctatacggaaacaacctgcggatataggaggagttccgcataaggaaagacaaccagggttctacatgtaaacgacaaggactactcggattgtatctatgttggtttccctagttctacttggacaaggggacacctatgggtataaatacaaggccccctagtaggagagaggatacagacaatcgacacgaccaccacaatcaacacccaccatagacggatcaagacagaagatcaacatagaagccaatatacgccaagacaagacgccggatatcgacttcagggataagcacggctagtcccctacggtgtctccagatactgtcaggagagacgaaagcattatctctgatctcgccgggcacgaactcgaggaggaagtctaccctgttgtcgactacgagtcaaaccttcagaccgccatgtcgacaacaattagatagtctaccccaaatattgtactggtgtgattatggtgaataagagcaatatcggcttcggccaacaggatgtagtgttattacctaacaattcaggggcccgaacctgtataaaaatccctgtctcgatctcttttacctcagtctcgcgtataccctagtaccaacgatccccatactatgcaaataccggaaccgcgacatcaaacgtcgacagtttcaatcttgtaaaaagctaaaacataatcaaatcacttgatgaaacattttgttacaacgtatgaaacaacggtttccaaaaaatagggcgttgttttcaccctatataaaaataatgttttagcaaagaatgtttcaattcttaaaaaaagtgaaacatggtcagatcactggatgaaacaatttgattcaacgtatgcaacaaacgatttaaagccattgcaacacttaaaacccatgtatatcaacaaaccacgtgtccattaagataaacttatgaaacagtatcaaaatccactgtaacattccatctatacagagtaaaacatcacgactacacttgttgaaacattgttggtggaaaaaaattaaaacaaatcccactaataggatgttttcgttatattcgggcagttgttacaacggtacgcgagtggtgaggacacgtggtagaagcggcgcacgtgcgtgggaggcgaggcggaggcgcccgatttttttttttttttgcaccgcattggacgctcgattttgagcattttcgattattgtgtggtatatatcaattccggactcagacagctacttacacacgtcacgtacatactagttgcaacgtaccggagatgcatcgatcgatcaaaccccagaaaaaatgatgcgaatccagcatatatttcctcatgggaagcactgaacaaagctgacatgtgtttggaggaggaatattatcatctcttcgatccccaggtccatcgaaatgatgcatatatattcctccaaaatcttgctttaattcgattccatctccatgattagacaattcacaaaaattaattgaatagctaattaagctctcctgattaattggtctagtcaacagagagaagataacggcgatgcgctgctgattcctctctctgcctgatctgcagctagcctaattaacaggatcacgtaattagcaaaaccgaaaaggttgcatcagtttagcaagcttagctagccgctgagttgaggtacagttgtcgaagcctcttgacgaatagcgttaattgtagtactgactctgtaattgtgtctcgtggatagcttaaggctctgtttagatccaactataaaattttacaccatattatatcaacatttaaatactatataaagtattaaatatagactaaaaataactaattgcatagattacgactaatttgcaagacgaatcttttaagcccaattgctccatgatttgacaatttagtgttatagtaaatttactaatgatgaattaattagacttaataaatttgtcacgcggtttaccgacggattctatagttagttttttttatcagtgtccaaacacctaatgtgacaacctatataatatctgatgtgacacgctaaaactttacaccggtgatctaaacacctccaagatgattttttttctttttctggaaacactgggactcattctgtcgacgtttgatgtcttgactacggtatttgcatggcatggggatcgttggtactaggatatacgcgagactgagttaaaagagacggagacggggatttttatacaggttcgggcccctgaatggtcaggtaataaccctacatcctgatagccgaagccggtattgcccttattcatgataatcacaccagtacaatatttggggtagcctatttaactgttgtcgatatggcggtttgaaggtctgactcatagtcgacaacagggtagccttccttctcgaatccatgcccggcgagatcagagatagcgctttcgtctctcctgacagtgtccggagacaccgtagggtactagccatgcttatccctgaagtcgatatccggcggcgtgtcttggcgtatgtaggcttctatgttgtggcttctatgtcgattgtgttgggtgttgatcctcctccctctcctcctaggagggcttgtatttatacccataggtgtccccttgtcaagtagaactagggaaactaatatggatacaatctgagtagttcttgtcgtttccatgtagaactctggttgtctttccttatccgaaactcctcctatatccgaaggttgcttccgtataggacatggtatgtagtgggtcctgccgagatttagtcaactactattaggtatgtggtatccataaccatgacagtagcccccgacttcaatgcaaatgaacaggttcatattctcaaccgtagaccttggagtaactgttatcgagctcatgtgaccgttctcagtgagttcagagataacgttagacttcctttatcagcctcgcgcggacacctaaagagtttgtctgagtcaatttccgacgtcaaccaagaaagtacagagcatacgactaagtctcccgtcttgctgtaatcaagaatttggattgaagtcaagaaattttatctcggcggatacaccatctcttcattccgtattccttgtcgagatccaccaatcgttctcgagtaatcgagtaggcgtagagtctgcgacggagccttatcaacatttgtcgtactcgccttagtcaatcttggtgtagaaccatagagacatgaagtcttcgacattgtcgaatagaattttcctgaaatcaatactcagaaaagaatattagatagaaatagcccccgagcgaatgctcaaagggtgacatgttataatatgtatgaaaaccgaaaatgaattaaacttacagaccaatgttttgtatatgagcgtctattcttttaccgacttcgatcagtcagtttgttgagttatacactctccctagcccctagccctgtcatcagagaatcgttctcgaaagataaggctcttttacctttgacctgcctcggttgaaaaagcactgatcctagcccccaaccatgaagttggaaaatccatttccgattatatggcttggttaatacgcacggcgagaactcttacacgaccagatcttatatggtcttttgtctctgaagtatccgacaaggccttatcggctctgggcgtccccagccgaagttcccttaggtttctcggaggcattgtcaagacggcgtaaagggacattaggataggtttcaacgctaggtgtcttttgtggtaagggatctctaggtaaaacacttggcgatattgtgtctctcgatcatttggagtcgtggtacgaggaccgctacgctgccggtcgaagactagtcgtagctgttcctcaaccatctgaagtcatggtgcgagagattgctacgttttactagttcgagaaccagcgagcgagtagaattatctctcgaacaccaatggaagttgcggtgcgagagattgctacgtactggttcggggaccagcgagcgaatagaatcatctctcgaacaccaatggaggttgcagtgcaagagattactacgcactggttcgaggaccagcaaacgtgtagagttatctctcgaacaccaatggaagttgcggtgcgagagattgctacgtactggttcgaggaccagcgagcgagtagaattatctctcgaacaccaatggaagtgctagagttggtttattatgtgcgtctcatgtggccagcatgactcacgcatccaacttgtagcatatccggatgtccgttcgcaatcatagcggttgatcaagccgacgacgtttgcgaggaattatccgttaacaaccttttctcgagtagtccagccatggccggtgctatgagataggtcgtcggtcttcgttggtgggttgggcgcgatgactctgcatttgtcgagatcgttctcgataatgcggtgtacttgaccataacctactcgagtgttcaattgttcctgaaaaatattttctagaagacaagacatatagcagataatatcgagtatgtactcaaaaattgcatggatcttctagcattatcaggatatgacgagcagatataaatatcaggcattatgtaaaccgtaaacaagcatgatttatatggaagaaaatagagcgagcccccaatgttaaaccgtagtcgatttaacatcggggacactcgcgcaatagattttgtataaaaagaaacatgttctaggtagacataatgaattattgatctgacaatattgtatagatcggaaaaaataggtacgataaattgcatataaaataatgcgtacctatctagatattgccagatatatctacgaaattagtagattaacttgaaaattaacctactaaatacctttggtttgtccggatggcatatgcacatataactaaagtcaccatgcatatatgccgtatggatgtgtgttgtctgatctttgaatctgagttgagccacgtgtgcatgtgcagttggtaggaaatcggtaattttgttgaccgtgtatcccttgacttacgtggcctcgcaaatctcctgtcacggcaagggataattagagtccgattcccacacagcacacgagcacacgtagtcgtctaggattcaggggatgagtcgtccggtttcctcggtgatggcgttgatctggcggctagatggtcaaccgatcggctctagtgaattttcagagcagacactgtgacccgaagatatagtcggcgccgacgaagtagttaactattgtcctccatggtcagctcaagtactccgattggtgaggtagatcaatttgttgacgatgatgatctcgatctcgtcgggggaacgtatttcgttcgagttagatctcccagagccgaagttgtcgagtaacttgttgttggagagtccatctcttaaacccatctcgtcgaaaacctgaagcaccaaaatcccctacctagcacgccactgttgatgtttgatgtctcgactacggtatttgcatggcatgtggatcattggtactaggatatacgcgagactgaggtaaaagagacggagatggggatttttatacaggttcgggcccctgaatggtcaggtaataaccctatatcctgttggccgaagccggtattgctcttattcatgataatcacaccagtacaatatttgaggtagcctatctaactgttgtcgacatggcggtctgaaggtctgacttgtagtcgacaacagtgtagccttcctcctcgaatccgtgcccggcgagatcagagatagcgctttcgtctctcctgacagtatccggagacaccgtagggtactagccatgcttatccctgaagtcaatatccggcggcgtgtcttgacgtatgtaggcttctatgttgtggcttctatgtcgattgtgttgggtgttgatcctcctccctctcttcctaaggggcttgtatttatacccataggtgtccccttgtccaagtagaactagagaaaccaatatgaatacaatccgagtagtccttgtcgtttctatgtagaactctgattgtatttccttatccggaactcctcctatatccgaaggttgcttccgtataggacatggtatatagtgggtcctgtcgagatttaatcaactactattagatatgtggtatccataaccctgacatattcatctcctgacatgtggagcactagatgctgtacacctatcggatgatctgttagtatacgcatatccacaaaaaacaaattgtacttttctttctttttttcccctttttaacgtgcatgcagtctccgagagtttgttaagagatatacccgtttcacaatacttaaataattttatttatcgtttaagtttgactactcatattttataaataaaattataactatttaaaagtatatcagtaaagtatgttatataaatataaacatataaatccctttcaccataattaaacggtctaaagatactagcggtgaaaccagagtaattggtagtcaaaattaagagtgaagtgcacgaggtgattcctagacttgtgtgaatatgtcacctatgtttttgaaccatcaaaatacatttttaggtctatgaatttatcttgggtgttatataggttcagacatatttcaacccgcttcgtatgctgacgtggcatgtcatagtgatgcctatgtgtcactagaatccacatgccagtcgtataaaaaaagtaaattaagagagagagagaggagaaaatgatgtttttaaattttgaaaaattaaaattaaaaaaagagaggggagaaaaaaatattttcaaaggcgttaccatatcatgccacgtcatcgtgtggagcggcttggagccgtttggacttatatgatacccatgacaatttcgtagacccgaaaatatattttgagaaccaacaatttatatgacacacccgcgactaccgttacactttactccaaaataaaatattataaatcagaaaggagcatatttcttgcactttttccctcgtgcaacaatgttgtcctattatttcaccaacatttatgacagtgtcaaatgtttacaactttagatttataagtgagatataggactgcaaattcgagtttggttttaaaattgggcgacgacctatcttctctactggttttgactttggtacctatagcaaaggttggagcaggacaaggactatagattatgcagatcttgtcaaacacggatggagatgtattgccatttctgtgtttaggttggtgttctagttagttatcatattttccatcaaattatatttttcaatttacagacgttttgaagtagtttcttcgaaacaaagcaattttccattatctaaaaaaataattgcaattttctacaaaaataagctaaagaaatgggtaacttatagaaaatccaggttttacaatgaaagttgctaaaactcttaggtatcaaacacatgtgcatataacctcaagttttacaatcgctctaattaatgttttcttctgcaaaaaacaactatcattcaaactcaaacaacaacatatcggacacccatttactctttttttatgccacaacatttatgttgctctattcaactattttgttatttcaaacaatattgtttcaaaaatgctaggattctgttttgcaaatccttataaccataatatgtttatttaacactagcgatgacacgtatttggtaactttgacaacaatatttagaactttctgaaaatttctttaagaacatgtgatggaatggggccttgttgggacattgaagaagttcctttttttttaaaaaaaaaagtacattatcattaatttgactgcgggaccctacatgctatggtgatattaaaatagaaaaagaaaatgtttttaaaggagcttgaatactccataggtttgaactttgaagagcataaggtccatccaagaattcctccatgcatggggtctgagctcatgtaagaatctctctaaattttattggaattatcataaaggtatttctttgttccaaagtcataactggaacttttaggtcaccattccttacaatgaaggtcaagagtccagatcctttatatttatagacagagataatataatgcagagactatctaattatagtactgtacgtatgtaactatttcgaggacaaattaaaggccgtaaatcgggaatagtcatgttataaggtctgatggagcacacctgatcagatgcttagctctatccaaattgtttcccttatatttaattgttggattaaggatatttgatttagagtcgaaaaaatatgggtaattaattgttttgtgaagtttgatttccagcactttcctatcctgctcacgttttcgtgtctcacgttactctgaaagagaaactcttgtcctttctatcaataaatgatcggataacacactaaacatccacctgtaactgttattgcacggtgtttccttttttttttcgctcaagtgtgccaattaaacatgagtggatttcttgcaaccacaattatgtaaatcgctcctccgtcctcaccatttcttttcctaggatctgactaagcatcgcccttaaaattgaaatttgattatgaatggctctaaatgcataccgtatgatctaaaagcattttttccagtatatagaaaacacacatgcatcataaaatatatcccttaacacacgctcaaacgctgatgctaaccataatccataatccctaatctaagtaaggccctgtgtgattcagtttaagatgattataatctatattattagaagtaagttagctgaaacaaatgagtagattattatgataaattattataatgtataaactagattagtataatctaataatctcatctggatgagctttttttagattattgggtggctaaagacctactacccttagatgcctcaaataatccagagaaacaaacaatttgtagcttattttatgtcagcttattataattcagcttagagtaatttgaatttatattacaataatcttaaaactgaaataaacatagcctaaatcacttgaaagcgtgtctatataaaaaatattttgctaacctctcactaaatcgctattgacagtatactcatttttgtatgatattttagacataatgactatgggtagagtgttgcatccacaactccatcaccatatcttgtgtgtttctaattgtgttgcaaaattagtgtgggaaataacaactaattacatctcaagcatgatttgagatggtgcaggaatatcaaatctgatctctttcattacttggttagaaattaaaaacaaaaacagattacatgaagagattaaatacaaaaatattattatgaagaataagaaaaaatgttataaattataaagacattaacaatcatctcgacaaaataaatttggagtaagaattgcacaaactacatacagttgtaccagttcagatccacactcaaagtgcaaaatcatatttcgattccatcaaagatggattaacaaataacaaagacttgatgatatatccgagcagccaggcaatgcttatttgtcggatatgtatcttgaggaatatatccggtagtatctgcaattggaaccttctttttcttgaagaaaaatttcaattgagaacttcctacacacggcatctaccaaaaccataatctgtttttttttctgatgggccattatccgtgtttgattgttttcaagtcaacgaagataaacatcataatctttcaacttgatcgaataaactgcataaaccaaaacattttttccatagaaactactagtacctacgaatcattattaaaaaaaaagattcaaatccaaactacacatgtacaagacacaaaattactccctccctccaaaaatataattactttcaacattcaaattttgttctaaaatataattaactcttcgcttaaatctttatctgaaacaatcacaaccatcttttgatttcatccatcttattaatttccgtgaaaaacataagaaatgtgcatgaatcgttatgggaaaaaaaaaggttgagatctactcctagctaaacacaagacaagcagctgcggaagaggcagtcaaagacgttatcatcatcattattattcttgttaccgttcattggcttctctgatgtgttttactgcgtcgtacttagtagtagtaacccttaaccttggggctaaaattagccgcatgagatccggggcgagtgcgtggaccgccaggtggggcccactggccggtgacgtgtgcctccccttcccttcgcttggcgatgcgatgagatggagatggggatggagatggggtcctcctctgaccgaggctcgcgcctcccgattctccctcttccatcccaactacctacccacacgcacacccccttccatttcttcatctctctctctctctcacttaaataatctttttacaaattactaactttttttcttaccaaaaccctaaattagtttttcttacaatggacagcttttggcattggcagtgccaaaatgatcatctttccaaaatgatcatctttctcaggcagtcctgattctcactgagattttaagaatatttatttatagaattaaaaataaattagaagaagaagctaaaaaaaccaacttttgtaaaaaacaaaatgggaacagggctagaccttttccaaatcatggacttccttgaacacaataatttcgcatgattttttataggattcatctcatccacaatgtctataaaatttctttgttcgaaaggaggcaaatttcacgtgcatgggttgaacctagcatctttgtgtggtagacattcttaaatatttatatatttagaatggctaggtcttctctctagatttcatagaaaaaaaattcaaaaatgaaatagtttgccactaaaaatgatatcattatttcaaggtgctatatgaataaaatcattcttatcttgcgaatatatcacaatacaatttacaaataactcgttctaaatttaatttataaaaaaactgtatctgccgcgtgttaaaaagtcgccggcactcttccaacattactaattgtttgccacacaaaaaaaattggtttatcattaaaatcaaatcaagattattcaatttatttttttcataatttaaataaaaatgttttttcataatttaaatgaaaaaataaatttaaaattcattagaaagaaaaacccaactatttatatagccaacgctcctgtgaaagcgatcgccggtctcacatctcccttgttcactgtttctccttcaccattcgcctcctcctcctctcgagggagagaagaaaaaagctaacgccgccgcaagaatccaagaaggagaagagagagaatttgatctcttcctctccttccccgaggctctgaggcgaggtaggttgtcgcgggatcaataatggtggccatcgaggcggcggcggcggcggcggcggcggagaggggcccgatccgggcggtggcggaggcggaggcggaggcggaggcgaaggtggtggatgtggaggggaaggaggaggaggaggaggcggccaaggtggaggaggaggaggaggaggagagggagtacaagagcgacatgaggaagctggaggagctcatgtccaagctgaacccgcgcgcgcaggagttcgtgccatcgtcgcgccgcgcgccgccggcggcggcggcgcaggcggcgggcgggctgtccgccgacgcgccggtgttcgtctccgccgccgagtacttcggcggggccggcgccggagccgggcagctgcaggtgggcggcggcggcgggagggactccagcagcgacggatccagcaacggcggcgggcagccgcagaatcgccgggtcggtgagctgaacgagattgttgttttggtcgcctctgcagctacgcggattgatttgaccggatatggtttgaccttttttgcattgagttcgtgatcgcgtgaggatttggtgatttacgcattgcgatcgcctagaatgacggggttttaggccacggtgatcatttttgttccttcttttgtttgtcttcttttgcaagattcttttctccttttgtcttgttttttttttcaaaaattttgtgttaaaatcgcagtctttgagcgtcaaataaaaaggatctttttgccagtcttgaaaaaagaacaaaaaattcaaggacataatcgatcggatcgtgttactttgatttcagatgtttgatcggtagtaatcaggaggctagggagtgtttaatgatctgttgtggttgtacactggttgatgaggatttgatttgtgtatttattttttgatgtgatatgagcactgtgcttgatgtctactaggattggtttttgtggacctacatttttcggctgttgattctcagaacaaacacaagtgtactgataattgtgtgcatattgaattattgattgattgactctggtggtgctatgctttcatgatcaattgaccctggcttggttgtaacagagaaggagtggattcaaccagggaaggaggaggacgggaggccggacacgacgcgccgatagggaggatagtgtgcggaggaccgtctatgtctctgacattgatcagcaagtgagcaatctaaagagagtggtgtatttgaagtgtgttgtttttgtatattttgctgtctgatcatctttttgtttcctctctaggtgactgaacagaagcttgccgaagtgttttctaactgtggacaagtaagttatgatattcttgaggagacatgttactttatgttactcccttgataatgtgatttcttatgctcgtaatggtgtgccttccattttcatgtgaaacataacggataaaattgttatctgccctcttggtttcagattttatggtttgcttggcacggtctttaaaataagttacttgactgcaaactgataaatagctgcctttaccgattggcattcctgtggcaaagtataagcttgtgctacaattgaattcctctgcaccatctgttttgagacgtgaattgatgcaaccacgaagataactgttattttgaattatgtgttttgtctctgtagtatttttggaaggtgaaattaaaacatttgatgattcagtagtaattactttttagtttggagtccctggttagcaccttcttttagagtgcaaagatgaatgtcgaatttcaacatatagaggttccctgtttgtataactaaatggaggcatagcagagtgctgacacatcatatttacaatgttcgcatgtgaaaggttaatctgctgtttgtcaatggttatttatctttatgactacaaaaatgatacatgtattactgcaagaatgttataacaccaactgaatcggagtcatctatgactatatgactaaaagaacaagtctttcaaaacaaattcatatcttttttggactataatgtatgttacttttttatctgttaatgatatcaggtaaacacctttctgtctatggatccaattgactattggatggataacttacactcatatttctttacctgtaggtggtagattgccgtatctgtggtgatccacactcagtcttgcgttttgctttcattgaatttgctgatgatggtaacaccttcacaactattgtttattttgtgtatagataaacagcaatcataaagttatcctttcttgtgtgcagccggtgcaagggccgcactaacactaggaggaaccatgcttggttactaccctgttagagttttgccttccaaaacagctattctgcctgtgaatcctaaatttcttcctcgggtatgataattattggatcacatagttcaagtctacctgtagagcttactaccggcatttccttttacacatcaacaacatgtaatgctcttttctgtacagacggaagatgaaaaagagatggtctcaaggactgtatattgtactaacatagataagaaggtacgtgagtttatatgcatgtcattttgataatccttaaggacccttaacatgttagatcttgaaatttagagtatagtgttacattgtgctgtgctgtacctgttcaacagaattttgatcttggtcgtttgtgtttaatccaatgaacattctaaatgatatatgcggttcaataaatcctacttaagcaacatcatctgcttaaatattctaaaatgagctgaggctgatatacatgtttctaacatgttgattcttgatattttctctgctgaaattctgcactagttttaatgactattatttcgcgccgttgttaacacatgaacattgcaagcaatggacccatgatttaatgcataacttttactcccacattgaattgaggtcttgtttgttatggaataatatagtatgtacttctgtactattttagatgccgttattctttactcatctgtcctttcccctaaagtctttatgtgtgcccagtgaatatattgattttgaagtgataccaagtgtcttcaagacagatacttaagtatgtagatattcagaaaagggtagtgtgatattttttttttctttcagtgcctaattgccagatttcatgataatatggggtctcaggctcatcacattgttttttagattatttttttcaaaaaagaactaatcatatgattttcttttccctgtggtacagtaatattgacctgcgactgagtttgtgtatgttctattctccaagagtcaagctgcttaacataattgtcttcctaactgtgcaggttacagaagaagatgtaaagattttctttcagcagctttgtgggaaggtgtgccacataagtacataaaacttgcttttctctttcctttagaccttctgctgaaactaacagtaccttgcactgttctgtcaggtttctcggctgaggctccttggtgattatgtgcactcgacgtgcattgcatttgttgagtttgctcaagtaagtagagcaaggtttctcagtgctataattttgtagtactatactcataaagtgcattccaacccatgacttggtaattgttcagtgtgtttgaaacgccgattcgaatgttattgttttgcaggcagaaagcgccattctagccctgaactatagtggaatggttcttggcacacttcctatcaggtaaagagtaaatccaatgttttgaagttgatgcaggagcatcatgaagaatcattatttgcttagccccatccattctccattgttgcagggtgagcccttccaagacacccgtgcgtccgcggtcgcctcgcgtgatgtcaaactgagtccgggttgttcctgaagcttgaggctgtcaccaatggcaggcagagcttgaaactctagtcatggcgtttagaaatgctgtcgcttcgcggaatcggtaactgccgtttctgagagtatcatctcatcatctcttaggtccaagtagaaggccgacctgctgatgttcgtctgttcagagacccatctgtaggttgggagaggctacattttcgtttcttttgttcagtatgctatgttcagtatcctataacagcctttgcaggcaattccgacaataatatctacgtattttctgtctcattcacactgttcatgtgaatatgtgatagttgaaattccatatctgacggtgaacttagggttttatttttcattactagtgaaattgaaatgattaatgtgaaaattcctcaaaaaatttatgggccctttcctttggatcgaaagaaattcaagggaattttaaggatgataacccttgattttttttcttaaatgcgatgtttggaacaaagaattttagcaagtcaaattccctatcctatgcatcgagaattttaccgtgacctcaagctccattttatttttcgtttgaggaatccaatgcgtcttttaatctctttctctctcttaattccatcaaatttctatggttatattcctataaactacccaaacgcaatgccccaaaattcttgtgttttgaactctagctgggtttgcgcatgtttgatattctaatcctgtgtttttcgtattgttcaaatcttgcgttccaaacgtgcccttgatcgttatttttgtcttcaagttctcgttttgtgcttgacgtgttcttgctgacctagctgcttatgtcaaaatggatatgatatgtggagcacaattttgcttttacgagccacctacctgtataaaacttgtaagttcaccaaaaagaaaaaaaatcggaaatatgatgctgtcattgctacgcgtgcgagtatcgtgcgtgatttgtacgcttgatcggtcgtcatcgtcgaaaacgggacatggtgaccgctactagtcgggtccacgtgccaagttctccagatgacaaaaatgtttctggtttttgttcctgacgcgcgtgcacagatcgacgtcgacatgcgacagatcttttaaggggatatggacgtatattcgaagtattaaatatagtctaataacaaaataaattacataatccgtttgtaaactgtaagatgaatttattaagcctaattaatttatcatcagcaaatgtttactgtagcatcgcattgtcaaaacatggagtaattaggcttaaaatattcgtctcgcaaattagtcgcaatgcgattagttattttttaacttatatttaatacttcatgcgattagtttaatgtgacagtgtaaaaaattttaaggtgagatttaaacaggggctaaaagttttctttttcaaatctgaaaacgaaatgactcaataggtaaacagtgttttgaacagtaaagatacgattttgctagatctttctcaacagattttcacccccaatatttgtcgtttttctatccgtaggatttgcgccatgattcgtgcatttccctgtgtggatgagaccgtgtggcctgtgagcagatggcctgggagtcaatgtgggccaacccatgttaaattttggattccgcgctattatgtccgtaaccgttggttgtttcctcgctctctttctttattctcgctctttctctacatctctttctcctctttcttttctcttctcgttttctccgtcgagagagagagctcgccggcgagagagagcacgagcagctccccagcgggagagagagagcgcgcgcgctcgctaggggagacaactcgagagagagtgttttttgagtttcttccctgatttgctggcatcattagcttgtgttttggttttttcaatgtcaatagggctaggtttagaagattcgggtcaatacatgacgattttttttgctcccaacatatggatctgattcagaatcacttgttttagttttggaatccgtttaggttttggattccctaagtttttagttatagtttgattcagttcagtctagggtgttttgttactagtccattgtttgcaaacgaccagattcgatggtgttctatgtttttttttctaatccacgagggtttttgtatttttggtttgatttttctttaggggtgttcatgttgggggttggattcaggggtatttgatggagttaaaggtttaattcgaggtggatttaggggttttttctaatcacccagatagttgatcattttttggatccctgcatgaattttcttcagggagggggtcagattcatgagttgattatttttgctttgatttatgtgtgatttgaatatagtagggaagcatcattgcaactttatctgaatgttgcatttcactttcagtgattagttgactgatctgttaaactccttgcatgagtctgaatttttctgcatgtgaagcatttcgtttcagagatgatttatctgtcaactccctgcatatatctgaattcttatgcatctgaagaattttgttttacatatgcatgctaactgaaccccaagtatgttttgtgttaccttctgcagcatatgaatcatttcgtttcagagatgtacggtttgatttcccagtatgctgagttgcttggttaaattaaacccaaacccctacatgcgttctgctttcttcagattgtattctacagtactatttggtttataaaattcctgtacatgttctgaacttttcagtgctgatctaaatgagttagcagcaagccaatacctgaacttggtccctgttgctttgagaaattatgggctattggttgcatctgctctttcttctcttctgaacttttgttcattgtcaatcgctcgtaaatcgtaaatctgtttgaattggcgctatttctgaacttgggaacataattggcactatttctgaattgggaacaggggatagcacgctcgtaaatctatttgaattgtcagtattttttgaatcttggagcaggcatgagctttcagtcgacatgagctttttaaaatctcatacttcagcaaactgaaaaataatttggagggtttcagtctaatgttgatctaatgcatttcaatggtagcaaaaccaaggtcacttgggtgcctggaggtattcacatgcctgaaatatctgtatgattttttttcttctttattctgaatgacccatcgtcccatcccaatattgttcccatgttaattatgtgtggagcttgttagtcagttaactcatttgctgtgaaatttaatcgggaggctcaacaacaacaccctggctggtccattcccttctggtccattcccttctgcatcagctaacttgtcacatcttgttgtcgagtgattttaatatatgtgcacagaagtttgagatatgtgcaaattatgtacaaaatttaatatatgggcaaatttgtacacaactggagatatgaccgtttggaccacaatgctctgttttttttatcctaggctctaatctaattgttgtgctttgttaaacaccactgtctgaagatgattttcacttgaggaaaatcttcagtccattgtgacaaagtgactccttttctgaagaaattctttattttttgaagaaattcaagcatgcttgcagttttagcccagttacagtctatatgtattgtagttacatatgtaacttttgttatttctcactgtaactaactatagatatatagtccttgaaaatttatcaacgctacaatctctaatttgttgtatataattttatgctagattatattgtctgccaagatcattttatggtgcataatgctaggtgagcatgataactgacctttcaatgttttcttgcttcttatttctctggacaaaattttgtcactttcatatctctccgattgcatatcccctgatttttcagactgtaacccatcagaccctgcatgtttatattatttgtaacataatttagaacttgttataataggggaaaatatttaatgctgctgcatgagtactgaattttttttgaagaaattcaagcatgaaagctgttatagcctagttacagttcagatgtaatgtagttacatatgtaacttttcttatttctcactgtaactgactatagatagataggtctttagatttttcaaagccgccatctctaatatatgtgctagattaaattgtctgtcaaggtcaaatatggaccataatgctaggttatcatgattatgacctttagttgtcttcttgcttcttttttcatcagacgaaattaatgttatctctttcagatctctctgattatgtatccactgttacttgagatcgaattgtaacagaacctgcatagataggttatttgtaatataatttagataatgtatattagacaaaatttttttgaagaaattcaagcatgattgtagttacatcccagttacagtcaatatgtactgtagttacatatgtaacttctgttacttctcactgtaactggagatagatagtttttcaaaaaaaaaaatcatgctttcatgtatacaaaattgtgctagattttatgactgacaagatcaaatttggtgcataatgctatctgtccattgttctgaccttcaagtgtcttcttgcttattaatttttctgagaaaattttgtcactttgacatctatttgactctgtattcactgttgcttgagcttctaatctatcaggcgttgcatgtttcaatcatttgtagtacaatttagaacaagtcataatagtaaaaaaatgttaatgctgttgcatgagtactgaattttttgaagaaattcaagcatgattgcagttaaagcccagttacagtcaatatgtactgtagttacatatgtaatttctgttatttctcactgtaactggatatagatatatagttctttaaaaatttatcatgctactatctctaatttgttgtatataaatttttgctagatgacattttctgacaagataaaaaatggtccataatgctaggtgagaatgattctcacctttaactgtcttcttgcttctcatttcttcagacacaattttgcttctcatttcatatccatctgattgtgtatctcctgatttttgagattgcaatatacctgaccctacatgattaggttatttgtaatataatttagaacattttgtcataggcaaaaaaaaagttagtgcatgagtactgaatttttttaaaaaaaaatcaaaggatgattccagttataacccagttactgttcaaatgtactgtagttacatctgtaacttttgttatttctcactgtaactgaccgtagataaatagttctttatatatttgtaacataatttagagcttgttatactaggggaaagtgttttaatgttgctgcatgaatactgaatttttaaagaaatttaagaatgattccatttacaacccagttacagttagatgtacagtagttacatctgtaacttttgttatttctcactgtaactgactatagatagatagctctttatatatttgtaacataatttagagtttgttataattggggaaatgttttaatgtcgcagtataagtactgaattttttaagaaatttaagaatgattccatttacagcccagttacagtttagatgtactgtagttatatatgtaacttttgttatttgtaactgtaactgactatggattgatagtttttgttacgagtttttctgaaaaagttacatacttttaactacttgatctaaagaaatttcctattccaagcacttttctccaaaagaaattcactattccaagtgcttttctccaatatttttacagaactgagttgttttttgtttgatttaaaagatgactggcagaatatggtgaagtcaatggggaaaggtaaaggtggattttgtgctaggtaatttgttacctggaagattatgtcttgttgatttcaacttcttgacctcaatgttcttggtaagaatttgcttcttcttctttttctcgttctcctcactgtctatggcgtgctcgatttgttttgctcgatctaggggatttgtgcgaactggtgtggtctccctgtgttattttgtttttttctaacctttattggatgtgaagttgatcattatgggccatgatgtatttgcagttatggcctgtataattttttgtattgttctatgggctagaattcgagcccatgtagttttgtgatctgattagtcagagaaaaaaatatgtagcattttttgtgtcctctggatcttaatctaacggtaggaaaaaatctgggtgattttgacccaaggatttgtcgacaaagacatagctagttccgtaaagataatgtgcctattattatattgacgaatgggcgaataatgggcttagagacaaacaaaatcagcccaccatatattaatagcatgttcttttcaggctttcagctactttaccagaatattaccacggattattcactctacgccactaaaaaatatttttttttcctaaaaaatatacttctactgcataatgtagatctcttacttcttaattttatttcttcaattatttaacttacccctatacttttaagtagataaaatctacgacaataatccagtaaatgatagtatgtttcaaactaggccacaccatttggaacacctaaaactcaaaactaagggaaaataacaaaacaatatgtttcaatgtccgggtacgacatctctactatcttaaaaggggagccatcctcctcttccctgcttgcgcacaacgcgctcaaaaaaaaaaaaaaagaactcctggttttccctccccactgcactcacacagaaagtaaaactcgggcctgtttagaggagcttttaacagctgcaacttctcgtaaaatctccagttgctagaagctcccccaaacagtccagctttttatccagattctgagaatctgcagttgtagaatctggaaaataaactagaagccagaagctgggttttctagcttcttcagattctcatcagctagcttctcagcagctgcttctcagaatcttcggtggtgtttggatccaggaacttaactttagtctctgtatttagacactaatttagagtattaaatatagactacttacaatactaattgcataaatgaaagctaatttgtgagataattttttaaacctaattaatctataattagagaatgtttattgtagcatcacataggctaatcatggattaattaggctcaatagattcgtctcgcgaattagtccaaaattatggatgggttttattaatagtcttcgtttaatatttataattagtgtctaaatatccgatgtgatagggacttaaaagttttagtcccatctaaatagggtcttaagctcccccaaacaggttccctcactgcttaggcatgcatcacgtactctcgcataaaaaagaaaactccaaataaaaagtagttagttaagaaatattttctccgtccaaaaaaaatctaacctagggctcctcctgtttacggagggagtacagtcaacctattcacagtgttataggcccgttgcaatctttaggttagatacataaccagtctaattatagtggtatatgggactattccaatgcagaggcatatattactagtagaataacatagggttgtaagatgtaaatggaagaatccaaatggtttatcatttcataggaattttaaaggaaagttagtatcctataaaattcatatgtttttttttctataaaccaaagaaagtgtacagcatttctgaatggctagaattatgggcttcccagcgaggaagttaatgggctcaaagtatttctgtcctgtccaggacggatggaaatgggcccaaatgtccatcaagcccgaagaatggatctaaagtatggatggcaggccgagcagaagacacatcaagaaatgggtagttcagttcatagatgacgaagtaaaatatctacaaatagcacatactccatctgtcccgtaaaaaaatcaatctccgattttagattggttttttaatgtaacagcggaagtataaagttatgcactcaaatgagattttaaaaaaagaaacaaatgttacgagaagcatttcttttgaccatctagaatgatattagaagtgtcatggatactcttcagtttcgtaatctgaattactggaagtgcattcagtgacttaaaaaaggacttaacaattttttaaggagcaacactactagtcaaacccagtagttaatattttttttataaatgaaaagatcaaaagatatttacatatggagaaactctatagtctatattgtgtttatttggaatggttgggatcttctccttagcgcacgtaaaatggagcaagtcattaatgtgtgactaattaattattagttaaaaaaactttaatttttttcaaaaaaaaacatactatttagcagtttagtaaacgtatgcgtagaaaacgaaagaggaaaatttaagaaaggggagaaatgaatacaccctaaaaccatttgtttctgctcatcctaaagtatgcaagagaaccttcattttaacagtgggcaatctttgctgaaaggtaaggcatttcgctgctttcatatgtgccaacaggaccagtagaatctctagaaagccctttcttaatacgcaaggactatcatttgatagaaagacagagatgtgctccatgtaataaatctgctataagcacattgaaagaagaggtgtgttccggtttccctcacctgagatgtgctccatgtaatacttctgctataagcacatgtcaagtctgcatcttgcggtgcacaatgcttttagtctgtcgtttaaagatgcaaacacagccgctgtcaccactgatgcaaattcgaagcgttcagaatcaagcttcgtagaatgattggtccatattttattttggatcgggctgcaaaagccaaataagtccccccttgacatttacatcaagtacacaaccaaaagaaaacgtgcgagcaaaaaaaagtctccagaattcactagcatcggcgaacgtactagttaaacatattcaccatctcatcatggaaggagttattgatgattgattgattgcacctgctggaagcattcttgtggacaatctagcctgtgttctgcatgccggcagcaatgcccttcatcgtcaggatgagggtgtcctccaggccaggtgcgtactcgctcgcagcgttcagttggaccagctcggcaggctggttgctgtcgacgaactccttcgacaaggccggctgcgacatcacctcgaagctagggtcccttatccgcttcagggtgtaggcttggcaaacgttcaaggtagtgatgtacgactcacgcagccgcagacgctgcttcaggtaaggatccccttccagaatatccttgtgaccggcaacctgcagatgatttcaatgtgtcaagggcactaacttctcagatctcagttgtcgcaacttagactgcgaaaagattcagtgatgatatgatgtgcactcttatttaaaacatggagtttgtttttatgattcagaatgcctaggtgtagttccagatttgtcttcagtataattttcaaacataaatcttttgatgatttcttcaggatcatatcatccacatcaaacaggatcatatatatctcaaggaaaaactctaaaagaaccactggtgtgggttaaagccaatatctggtgataaaaagaaaggtgcagcttaaatgcaagcaaacttaatatctaagtatagcccattcttattctagagtagtttacctgaaggagtagctgttttgtctcttcaaagttgtttctcagctgctctccaaaggattgcagatcacctgccacaagcaatttgtcatataaagcagcaattcctggatctcccttggcgaaaaccatctcaagcaagtccaaggtgaccctgaagaatggccactcattgtacatttctttcagtgtatggatgttcctgatatccttctgcattatatgtttgaacgctccaccaaatccaagccatacaggaagatgaaacctagtttgtgtccaagcaaaaatccaaggaattgcacggagcgattcaatgccaccactaggctttctctttgatggtcggctaccaatgttcatcctgccatattctgtctcaggtgttgcctggaacagcagatggacacacacatgtcagaatttcatgttcaccaccaacatctagctcagataagagataacataaagcacgaagtgactgacaacagagaaccaaaatatgtatgcaatcccttctatatggtagttcttagtcgattaacacaggcaagagaatgtgaaggtgcacctattgatggagaaggagcatgaaggtgcacctattgatggagaaggagcatatctctacattagtatttgatcccttgtcatagttaagtaaaattgcaaaaaactgtggacatgaagcttagaaaaattatcatggcctacacacatttgtcatgcaacttcgcatcagaccacacgctctatgcaaactgcaaagaactcatgagtatatctaattagcttagagaatggtcttgtcaagaagccttgaaattaagcataaatttacgcctatcggaactgcagcagattttatgggaaagaattcagaatagaggtgaacttaccgatcggaagtattcaacaaaccgtggctccttgaagacgattgatcgatattcctttgttgccacaacagccatctcatccattagagcacgccattctggtttgggggaaattggaggatgcattccatgctcaagagtagctgcagtaaagcgctgcagagttctaaagcacaagtgttcctctccaaacgagtgttcaataacctcgccctgtactgttacacgaagtgatccatgtatcgtgtctggtggttgagataatatggcaagatgactgggaccacctcctctgccaactgttccacctcttccatggaacattgtcaactttacaccataatgctttgccaccttgacaagctcctcttgtgctttgtacatttgccatgctgcagaaagacgaccagcatccttgccagagtctgagtatccaatcatgacctcctgcttgccattaatcctattcatgtaccagtctattgaaaatagtcgtgccaccgctgctggagctgcttcaagatctgcaagtttctcaaataggggaacaactcgcagaggctgttttatatggcactcccgctgtagaagctccacagcaagcacatcagatggtgcagttgccattgagatgatgtaagcaccaaaacaatctgccgggagctcagcaaggacgtgaaatgttcctaaaacatcagcaatttcttcagtctgaggaagatcaggaccaaacaaaggacgtttgccccttagttcggacaaaagccaatcctggcgtttctcctcagaccattcagcgtaagatccaatcccaagatatgtagttatggcatcaaggacatcagtgtgtcgatcagactcctgccttatgtcaagttttacaagagccagcccaaaagttgatacttgacgcaagaaatcaagaaggcttccatcagctataggtttgtcaccacaagcacataatgatctgtagcacagctcaagcggctccagaaactgcaagataggagggtgataattgagtactataagtacaacaatgacattcacaatgatacatataagataaataggattacctcttcaacattagtaaacgttgcctcctctggaatttcagaaactccagttgtcaatagatggcgagtacgttcacgcgtatagtacaatttatccctgacaccaccaagtatgacacgataaggctcatttggaggaatttgcttccagaattctgcaccattaacattttctcagtaagaggcaaatttagtaggcatttgctaaaaaatagtacaaatcagtcaattataaaatcatgcatgactttcacccaggttgatcagctaaatgagtaacaaaccgaggaaaaatgaaatgtagttaatcaatgtagttatgccgggagttgatgcatccatattagacataaaaacgtccagtccattttagtccatcactgtagtcaacttgataaatgttttgagtagggatttcacagcctctggaagaacaatgtcagcctaattatatttggctaaacaaataatttctttatattaaagttctagtggattctgaactagcagatgcatttttcaaattaacctgactaataattcaacactggtatccacaatatacacattacaattggcaattggcaagcacaattttcaagtgtaaaatcacctgaagattttacagtacaggtgaactctgataaaaattaaaggaaagatggcagatcttatagacaagcatatgaggtggctatgatagaaaaagaggctaagaaaatgatatattggtcattaaaaaaatgcatgaacatcatattagaactctatctgaaaacttgaaaatggttacttcatatgctaaaaagagaagggcaagcagaccaaaagtacagcttttccttcagactataaaatgatacacaaatcaacaaatgcgcaggccgacccaaaattcattatcaccacagttatggtattgttacctatatagtgctttgcagcttttctggaggagcaatgcaaatcatctgcacgaattcgaagttcatcactgcagcgccacatagagagctaggaaaacatattgcattgttaaaacttagaaatcagtattgcagtacttttttaagaacaatgaaaataagcaattctgctgtacctcaaacatcagatcttctatctgagagaagtacaggttagcagccatcattcttgccaacaagcatacatctcttgtaacctctggtgtaactcttgggtttcctagaaaacaagtcagttttagagttcaacttcttctaacagacaggattacagggagcagaaaaggctgcagttatctcaaaaaatatatttagacaagtgaataatacaattatttgaaaaaaatggaatctttgttgacttaaaagtgtggaaggggaataaataaccaattgctagaactaataccatgatgtcactaagaggacaaacaagccaattttctgtcaatagcacatgtgagcatgtgacagatctcaaccaagttctgttttcctttctaaacaaaaatggatgtataagttaggataggagaagataccatcacggtcaccacccatccaggatgagaactggatgagaggagcattgtaaggaagacgctcattaatcccaatatttttcagagcagtatcaatgcggcgcaagaactttggtacacccttccatatagtttcatgaaaataactcatcccggcgcgcatttcatcctgaggagtgggaggagtcctgcggatttcatcagttctgaaagctgcttgaatctgtgaagcgtgttaaaccacacaatcagaaaggcatgatgagaacagagtagtagaaaccaacacgacatttctgcataaactttgcaatatgcacatagcacttctctgattgaagatgaatttcactcagaaatcagaactagcaaaaagagctctcatttcaagtgtatcaaaagaaaactattggagatggacttcagaactgtcaagacagagtccaaaagtacagagcaattaatttatgaacgtgataggtaaacaccttttgaggatctggaaataatcacctagtgttcaatgtttttccttgtctccaactaaactaatgtaaaaaaaaaaatccttgtccaaataaactaatataaaagaatggtgtacagacaatagagataagatttctaaattatttggcaagatcatggagcaggacaggcaccacatagataaaagaggcacaaacatgatttgccacttcgactaaattaagcttttaggatggacctaattctaaattaagctactgcctgagagtatacaaatctcattaagcccagagacccataatttaagtcatcaagaaaaagaagccattgagctgataagcagtaaaataatcaaaatggtgcggtggacacttttgctatgattgactttataatattgtaaccacaaattgacaaaaaaaaaaatcaacttacctccctctgcagggcctcatcaagctcctgcttgtcatcagcagtgatgtctttcgcatataactgcctcaggcaattccggatcctgcacagcgagtcaacatcaagagcattagatttagcatttcccgacgcaccgagagcatcggagaaggggacagctcatcgacgcacctcccgtgcttctggagcagggacctcctgacggactgcgttggatgcgcggtgaacacgaggtcaacggtctggttcttgagcgcatcgaacacctcctccctcgacttgccgagctgggtgacgaggcgcttgagcgtctcctcgatgtcggactcggtgggcgcggaggcctcgtcggcgaagtccccgcgcttgagcttgatccggcggcggtgcgcgatctgcacctcctcggcgaggttggcgaggttgagcatgtgcgagaaggagctggagacgacgatggagtcccccggcggcaggctggtgagcttcctccccagctcgtcgagccgcgcctcgtccctgtcgttctcgtactccgccgacagctcgtagcactcctgcacctgcaagaagagaaccaaaaccaaagccaaccaaccgtgtgggcaatcgatcgaacaggtggcgggcacgagcaacaggatctgggaagcaagtaagttacgaattcgcggaggtgagggccgtgcaggtcctggaggatgtcgaggaagcggtcgacgaggagggcgtcgtactcgacgagcttgtcgtcctcggataccttccccggcgcgagcagccgcagctgcgcgtcgatcgactggtgccgctccatcgccgccttcccggcggccgcggccatctccctctctctcgcttacagctgcctcgactacgacgaatccggccagatgctgcgggaggcgagcctcccgcgcagctcggcgacgccctctcgcggcggaggcggcggcggcggcggagatagattggagggcaagtttgggggtagagagtgtgggtgtgtgggtgaggtggtgggggggggggggtgcgtctctatttgtatgcgacggtgaaaggcgatatcatcgggggtggatcggtttgaagaaattgacgatgtttgggaatctcgtgaagagcggcctttttcgcggctaggtacctatgaaacactttatttggacgggttgtttggaacatattctttttcgttggattgtttacttggttagcacaatatttaataagaaataaacttcccaaaatctgtaacaaagtgatctaaataatacggtgaaagtaattttatttttagaaatcgtaatgttagaagcgtggagcaactaatccgtgacgagaatctagagaaaaagctgaaaagagcatggcctaaggtgcactaccgatgttattttatataatggaatataatcctaggctttagttaaagagctacaaccaaggtggattactgatgtactctacgtatatgttggcaaaatcaatcgtttaccgagacgttaaagcgaatagacttgaatgtaatacattagataacgattacagatttaatgatacaactctggtagtattaaatagttacattattagaaaataatggtcggtcaaataggataactcaaagtcaaaaccaactgttatttgtgaacgcgtagagtattttcaatttgtgcactatatctaattatgcatttttcatgtacaccaccagaatttggcccaaaaatctacatcatcgaaagagttcatttcttagagcaggtacaatagcaagctataaatcagctataatcacatatcgagaaaaaaagataagagagagaagaaagcagactacagatttgtagccggctgcaacacggacttcaagacgttatgtgtgtatgaaaagtgggaccgggtattaatagtgtagtatatttctatagttaactattgtatgaataggctattagattagctatatataatttggaaccagtatactattaaacttgctcttatagtcatctccaagttaccttttatactaagttttggacattgtcacggtctctggtgcaagagtggagcaatagtgttactttaactctgttgtgtagctacggacatgataattagtgttgagtgcgcacctaattacatcattaggttgcatgtgctgtttgtgctgagcagtccacttgccctattgttttgttcgatgtcttctctgtttctattaatatcgtcaatttggcgtcttttggggcaactaggagaattgaaatgctcttggagaacatcatcacaaacctaaacatggtaatttaccttgtttaggttataactttttaggttcgtgcagataatctaaataattatcatcaggtagagtcgtagagatatccaaaaatctcaacatgcatttcaaatatagctcaaccaaattgcctgaataatgaggatgacaagcatgcccgtcgattgggagtggcgtgcatatttggcacaaggctcccaaaaattagaggacttccatatttcaaataaaggcaatgtgttctaccttctctgttttatattataagactttctagcattgcccacatttatatatatgttaataaatgtgtgtctagattcattaacatctatatgaatatgagcaatgctataaagtcttataatctgaaaccgggggagtaacatattttgagatatccaactctatttttttttaaaaaaaagctctccttttctctggttccactaatttggaatggatttttcttttagggtgcaattcttattccttggccccaaatttttaggtatgatcctgctaacaagaagatcgaacatgatgtttagaagaagaagaagaagaagaagaagaagaagaagaagaagaagaagaagaagaagaagaagaagaaaaggagttatcaaacaaaactatcactgttcagtatattgtactatatctgaaactttttttttctttttgaagcaacatctgaatccaaatttttattgctttcattcgtccatgaaaatgtcaaaagcagatctcaaactttgagttcactttctacatatcttgcatatgtgatatgataaagtttttttcttaaatttacataaaacctctttaaatatatacccccgtcccaaaacaaacaaatatgcagaattagatgagatataacatagtacaacgaatctagacagaaacatgtccagatttatattaggttatgtctcatctagctctacatttgtttatatccagattcattttagtaggtcatatcacatttaattctttttattttattttgggacagatgaagtattcccgtgattgagaaattcttaaagttagcatgagtttggtcaaattttcttatgagtttgctactccgctgcatataacgagtaattttcacttgaaccccattgacgtaattaagcagaattatttcttttagccggcatatattgttattgcagaaaacatgaaagtattatgttttcaattggagccggcatcaacacattacatggtttggcttgatcaattcttttccccttaattttctcttgcacggcctctaatctccgcctctagtggaccatatacagtcaagatgacatccatgcattgtcaagccgagccaattgacgatgaaggtgatatcacagagactttctaaattgcacttgagacaaatttcagagtcatactccaactcaaccaccactagctaagctactttaataaaatgttcaagctttttttgtgagggaagacttgttcatttggcattctgtactcaaaagccattatcaccgataaactactttatctgtacgttaaaaatttctatgattgaaagtgaaattccacctgatataacaaaaaaaaacatttgtctatcttttgccagtaaaattgcatgtcatcttgctctagcgtcgtgaacaacatgagatccattggcagatctagcgcgacagtaccatgactacccccgagtagttgcccaaacttaccggcatatggcaagaggtagaaatacattgttattggtatctgataatgccggtgcatgtcaagactcaagatgtagagaaatacctcatttgttggtaccaggcaatgcagacgactctagcgcggtggattttgttcttttctaaaaattcttagatccatcactagtgtgaaggtggtggtaagggctgagatacataattagtaagggctcctagctatattgtgggcacaccatacacctcttctgtctttgcctctgctaattaaagatgaacttaggagtactattaaagcttacaataataataaaagaaagaatccacactttgtatggtctacgagggcctctctgcataatggctggtgttgatcttccagcgagacgttccaatgggcttgcctggaggaaggaggaagaagaagcagcacaggatttgagggggaatcttgattggatctctcaacgaaatgcctcggcgctccacatgtcaaagcgtgacaaactgctggtcaaattgagtagtactagtagtacaaaacagagagtggcatcaatggcagggtcctctctggtgtacccaatggaccatggtgttataatgacaaggctttactgtaatcctaaacgcctaattaagtattatttgataggattgtttggatgtaaggtataaatattctcaccaaagccatatcaaatagtgaaaaccattagaacacataaaaagaactatacgcggtgtccgttgtttataaatttttatatagggtgataattccattatctaaaaaaatataaggcgataattgagccgtataggatgagaattcgacggtctaaaatgttttagacgaccgcgagatatggaagatccaccctaattttgtactagtatgtccttacaataatttaccgtacaacatatctgtagaagtcctttctaacgagttcccaactcatctccctcgttattcgagcgcacgttttttaaatgttttgaaaagtcatattaatccattttttaagtttgttatagataattaattgatcatacattaatttatcgctcgttttacgtgcggaggaggagggttcccaacccctccaacagaacacagccttaatcgttgaacttgcttaataagtatcagtagatttcttcggagtagtacttaagaatgtcctcttatcataaatatttgatggataaaatttgataaactttaatggttaataatttctcacgacttagttaaaataaatgttaggtgtatatttatcttaaattactatcataacaacacaagctcattatattgtctaaacttattctaatacaaacttgatggttcaatattaaaagtttaattaaatattatcttaaatgtaaaatatatgtgaccggatggagaattatgatacaaaagtatcccaccccaaaaattaagagttcacaacccatatcactgtctcaaagaaaaggtatcacctcccctcaaaaagaaagtcctcagtgcgtgtgattttaattgaaaatcacatgcgatccttcaaaagaaaattggtaatcacatgtaggactgcaactttgggtaatttagttttgttttagtcccccactagttttcctgcggatttatttcctattcgtacatctcatggcagtgccacatcgtccatttttgtatattatcgcgatgttgctttcttccactgggcattgatgacaacattgaccaaacttacatcggtgtcatcaatcaccaagcaaaaatgtattgggagatggattttatttatcttgtgctactccctcctgcaaaaggaatagaaggcctataaaatattttgattggttacgcaaaaaaatactccacatcagtagaatcgtctaaaaatgcattggttacaccaaaatttcataatgttctgatggttagtggtaaaagcagtaatatatactctctccgtttcatattataagtcattttaattatttttttcttttaatttaattgtttttaccaaaatttcataatgttctgatggttagtggtcaaagcagtaatatatactccctccgtttcatattataagtcattttgattattttttattttagtttaatttttttaagtttaaccgattttataaaaaaagaataacaatattttcaacacaaaacaaacaaattatgaaaatatattaaattttagttttaataaaactagtttggtgttgttgatgttgctaaatttttctataaatttgatcaaacttaaataagttttgactaagaaaaaaaagttaaagcgacttataatatgaaatggatggaatggatggagtagttagtaataaatgtaatagaaatattaaaccctggtttaatatttcattggctggaatttaactggttgttagccaataacaggctgcacacccgtgtcccaaacttttacaaaattaccggattttgaaatcttagtcccatcggcttggaagatttccaattggccaattttagggcccctttgaatcacgggaatgaaaaaacggaggaatagaaaaaacataggattctgacaggaatgtaagtgtaaaacagaggattgcaaaacacaggaaaaacataggaatagccgtttgattggaccacaggaaaaacataggaatttgaggagagataaagactcagggcccctttgaatcgcagggtagaaaaaatggaggaataggaaaaatacaggattctgacaggaattgaagtgtaaaacagaggattgcaaaacataggaaaaacacaggaatggtcgtttgattagagcgcaggaaaaacgcaggaatcggatgagagagatagactcaaggaaattttccaagaggttggagctcttgctaaatttcctccaaaatccacatgcaatgtgccatttcataggaatttcataggatttggaaagcttcaatcctttgaatcaaagggccaaataggaaaaatttcctacaggatttgaatcctataaaattcctacataaatactttgattcatagggggcctcaaaggatttcttccatgaggttctaactcttgttaaaattcctccaaaacttgtatgagaagaggcattccataggaattttataggattccatagggttcattcctttgattcaaagggctttgtaggaaaaaatcctataggaataaaatcctctaaaattcctatgaatttcctttgaattaaatgggggctattttaaacggtgtactgccactgcatgcaaaaatattccgactggtttgggggaagaagaagagtttttggatttagttccgtaaaatactggagaatgaaaagggatatgcaaatgtcattttcaactatcttgtttggatgtgcaaaatgcaagagaagaaagggaccttattttctagggtaaacactaccaggccttgcctaggagaaagggacatattcatgtcttcttctgcatctcatgataaacgaactggcagttaggaataaaaggcaaactgaaactctacttgtaagcttctgcatttcattttcttctgcccctccaatttgtcctaagaaagctgctcattgctcaattgtcgaagaatattcctctcccaccatctttgtgccccttagctctcattggctcctttacagtttcagtgtatggccattaaggcaggacagcaaagggtgttcataagatgattatattttgatctaacaccacaccatgtactacttattctcttgccatagcatgctaattagactcttagatcatgcctaagccttcattagttagcactagcatgaaactagtaagaattgtaaaagtgcaaaaaggccttcagaaaggtatcatagaactaaccacatgaaaagttacgctgaaaaggaacagatcgaacatctttgtgtgccagctccaaaatttataagttgttcaactaaagtagggccgagtttagttctaaactttttcttcaaacttctaacttttttattacatcaaaacttttctacacacataaaattccaacttttccatcacatagttccaatttcaatcaaactttcaattttggcgtagactaagggtgtgtttaagaagaaggggattgaggagattgagaaaatacgaggtgagccattagctcatgattaattgagtattaattattttaaattttaaaaatagattaatatgattttttaaagcaattttcttatagaaaatttttgcaaaaaacacaccgtttagtagtttagaaaacgtgcttgtgaaaaacgaggtgctttctgcctcaatgtcctccaaaacgaccgctgcctaaacacaccctagacaagtagtgctgatgacaagcccactactctgacagaaaatcaggcatcacatgggatcagattcagcacctgacaccagagtgttccctctgtcaaaattaaaaaaaaacaaatatacgattgaatatgatatattttaatataatgaatatgaatagataatattatatctatttctagattgatctattttgaaacagatgagggacaaatgtgacacacttgtagtacaaatctggacacgagggactacagtacagagcagcaatcaagatgcaacttggaagcaaagcacaagctaaaagggaaaaagacgatttccattttagatattgagaaaaaaggttatctatcaaagactgatgtgcaaaccttttacgtatgctcaaaaaataaaataacaaaagagcacgcaaagtaggaactgtactagggagctagcggtttcaatatgttgtgtaacccccatgttgtaccgcgtccatcactattttctttgcacttttttttcttttgcagatttgaactttctatgaggccgaatggccgacatatattttttcatactatttcttcagtggaatatcaaaagtagcagccaaaatgaaatgtgataccactattgtatatgaacgttgtggggatttaacttgacatggtcttaaacattacactcccattcatccattgccaatgcattttacaatgaatgtcaacaactacaaaatcaacactatgacactacattcatatataaatagaatgtttatctaccatacccctatatatgtattgcaagattagttcttgaacaaatgttacaaaagtttaatagcaaaatgcacaaccaatagctaagcatcgacaagtgggtactacagttggaagaatccaatcataattgtgcttaacttctccaagtagagtttaaaatgtatggatttcatatgatacaggtaaattctcacgggaattaggaaagaaaacctaaaagtacaataacaatgagaaattgaatatctaatataacaatcaataaagtaaatatctcgcctcaataagctatttccttaaactcaagatctctcttgatgctttaaaatcatcatgtacatgattggttgttttgtttgatagctagtccagttaaaaaggggaattccatatgttagttataccaaaaaggaaagtaaatatatatcttagataaagaagcacgccatcaaaaaaagggtgatacatatagttgagttcacatgccgctggtaacacaaaacgaacatattattgttaacaaccaaatttggtgaaatcatagattggattcaaagctagagcataagcggatttggaggaattttggttttggaaagaagagtgcgcatcggctacggacgacatcggctgctgtatgtatcggctgatactgaatcagacaaagacaagccgatgcagccaatctcgaacagatggttctacaattattgtcgggatcaatcaaggcactacatgggcattgccacacaaggattagggtctagaaaaggcgattgtatctattaattaggatgttttattaatttccttagagatatttttggtaagagtccacccaagggacttgttcgtgttttaaattgtaatagagatagagtcgtgtccaacaaggacatattatgtatttcggtataaatatagcccgaggccttgtagaaaaaacaacactagttcaataatactttcggtgcatcgccaccctttttccactttcattgtttttgacgagttcttgctttcgagttgggctgcatcggtttcgatctccgacgaagaggtaaggctggttatggcggtttgtgttctcgggattagtgcttacatcatcatgacactttaatcctgcctatgtcaatcgccaagttatcacatatgctatataacctagatcaatatcgttatccaaccccattggctatcctctatcatcgaaaacagccggcaaggttagttaccgacgttgaattaggttatatagcgtatctaccatctcagaaaagcttctgtcgacttgtttagatcttgtacttctcttcatgacttaatactggattagttgagtttgatctgttgagtaatgtttagaattgcaatatctagcccgtctatagctgctaatagagatagcatcgaggtttcagccaatcttatctggcttagttatcttgtcgctctcgcgtttgcttgatatgctaagtctaccctctatactaagatatcgtttgtttgaaatatatttatcttgctatcaatctgttaggccatcctaatgttagatcggttctcgttcaatatgtttcatctactgcgatatcttgatatagagtggtatcggagtactagctgatacgccctaggtttgcttcatcggctatggtatgaatgtatttcagagtacttttagacataagtgatttatactgtcttggcgtactgtccgatctatccaaatcacttagtttaaatgtattctgaggggccgattatatgtttattaatatctacagccgatcaggcgggcctatgtattcttgtgctacatacttccattgccgatatgatctttaccatatcggtctgatattgatacgtcaacggcaatctagccgatcggctatcgtttatagatttaactttgttcttttttgtttcttgttggttgcaggattaaactaattggcacgctcagaacccgaaggcaagtttttttggacctgcactagattaaagcaaatctctcaggccagtgtgtgtttttcacatcaacgattataaaaaaaatatgaaatattagtttgaatgaaatttattaggtattgtagatgttgctaatttctctacaaactcataaaaaagtcaaaacgactcataatatgatgaaacggaaggagtatttcgtatgtagtctctggctctctgctactttctcgttattactccctccgtcctaaaaaagacaaatcctggttttcgtgtccaacatttgaccgtccgtcttatttgaaaaaaaatatgaaaaaaattaaaaagacaagtcacgcataaaatattaattatgttttatcatctaacaacaatgaaaatacgaattataaaaaaatttcatataagacggacagtcaaagttggacacggaaacccatggtttatttttttttttaggacggagggagtatggtttaagctaggtagtcatgaggatgaggggctggctgatccgcaatcagccgcgcagggccgcacctgcgtggtcagttccgtgccctccagtcctctctcctctgcagtataagtatatgtatatcctctatatgcatacatataattttgtattacacgatacaaagtttatacgtatagatatatatacatatataattttatacgcatacactttgatgtataaaaaaattgtatacacgtataaaactttatcgtacatacatatttaaaaacccaaaaaaccaagggaaaaaacaaaaaagaaacaccacgtatacaaagtttatatacgtacatatacaaaagtatgtatacaaactttctatatgtatattcacatatacaaactttttatatatacatatcaaaaacggggaagaaatcaagaaaaaaccaaaaaaaacccaaaaaaaataaaactgaaagaaaaaaaaatagagaaaactcacgcatatgaccctccctcgtgctcctgccaccacccctccttcgcacgcgccacgtggctacgccgcggggggggggggacgcgtggatatccgtgaattagcaaacctaggtagccatggtcaataaagttccatgctcacgcagtcatgcttaagggtggatgtcaagctggctcggctcggcttggtctcgcttattaggataacgagctagctcggctcggctcattatcctaacgagctagaaaccaagctcggctcggctcgtttgcaagctcgagccagctcgtttagctcgtgagctttgggcagcgaacaaggagaggagaggcgccgaggaagagcggcgcggacggcggcgtccacggtcacttcggcgccagggaagagcggcgcgggcggtgatgtccatggttacggcgacgttggggaagagcggccgcgtcggcgaccgggaatagcggcgcgggcggcggcgtccacggccgcgccggcgatggggaagagcggcgcgacgcagcggtgtgggcggcggcgtatgcggtggcgttaggcgttgggacctgggggagagccgcgcgagcgaccgggcgttgagggcttgcggcggctcgtgtgggattggggatggggaatagagctagagttttgatgcatatatgggccttcaagcacatatggcccacaagtccacaacggcatgggctagctacctcagctcgttaaggctcgcgagccagcttgagctagttcgttatctctaacgagctaaaagtagggctgtcaaaaaagctcgaggctcgcgagctgctcgagcttggctcgtcctagactcgattcgagctcggctcgagctccaaacgagccgagcccgagcctctccctaagctcgcgagctttgtcgagccgagctcgagcttccaacgagcataataatatatgatttttattgttatttaataaattaggagatcaaatatgttatttgtatgccttatattgacatcatatatttattttattcttttttcctcttcttttaatatgatgaactagaaattaattattttttaattatttttaaaagattatttttgaaatatatattattttacttaaaaatctagctcggtagtcgagctcgagcttggtcgagctcgagccgagcctgtcaaaaagctcgaacattttataggctcggctcgagcttgtatcgagcttgtatcgagctcgagcctaggcagatgagctcggctcgttgaaagccctagctaaaaggccagctcggctcgttaggaaaataaaacgagccgagccgagcttggcgcgagtcgagcaatctaacgaggcacgagcttttcatccagccctagtcatgccgcactccacaacatttttctctaatttccctttcattccttccatttttccttctcaaaatttggcgggccacgtcgtgccgacgggccgccaccaggcccacgacccccaatcgggcccgtgccggcaaaggcctaccgtgccttaacaggccgggcggcccgtttggcccttagaaccgacctgtctcctcctctctcttcagtctctcaccgcctctcgctgagacgagacgagacgcgtgcgtcacagcagctcacgattccgtcgcgcaaatcctccccgatctaaacctaaacccaccccaccccacgccgacgaaaccctaatccccctcgcctccgccgccatgggggccgccatcctgccgctcccggcgccggacggcgacggcgactcccatccgcaacagccgcctccccctcctcccggcggaggcgcgaagcccgagccgccgccgacggtggccacccacacccgccccctcgggatcatccacccgccccccgacatccgcgtcatcatcgagaagacggccaccttcgtctccaagaacggcccggagttcgagcgccgcatcatctcccacaacgccggcaacgccaagttcaacttcctccagccctccgacccctaccacgcctactaccagcaccgcgtctccgagctcgctgccgctcccccctccgccgccgcctccgccgccgacgcggcccccgagcccgacgaatccggcgccgcgccgccgccggccgactccgctgccgcgcccaccgtcgatggcgaggcggcgaaggcggaccactccgccccattccgcgtgccgccgcccaccaaggtgctggtgccacccaaggcggagctctacacggtgcatctgcccgaggggatcaccggggaggagctggacatcatcaagctgaccgcgcagttcgtggcgcgcaacgggaagagcttcctgacgagcctggcgcagcgcgagagcaccaacccgcagttccacttcatccgccccacgcacagcatgttcaccttcttcacgaagctcaccgacacctattcgagggtgctgaacccggtcgaaggcatgcctgccctactgaaggacctacaagacggggcgaaggacctgaccaccgtgttggagcggtgcctgaaccgcctggagtgggaccggtcgcaggagcaagcgaggcagcaggctgaggatgaaatcgaacaggagaggatgcagatgcagatgatcgattggcatgattttgttgttgtcgagacgatcgagtttgcagatgatgagtgcgagggactccctgtgccacttacgctggaggagttgaagcgtcggaagaggattgaggacctgggagaggaggaggcagccatggaattggccgagccagcgaaggatgttgagatggagatggacgaggaggagattcaacttgttgaggaaggaatgcgtgcagcaaggctcgaggaaaatgaaggaggagttcaagttaagcttgctggtgatgaggagccgcctatgaggattgtcaagaactacaagaggcctgaggagagaatccctgcggagagggacccaacgaaattcgttgtctcaccaataactggggagctcattccaattagtgagatggaggagcacatgcgcatctcgcttattgatccaaaatataaggagcagaaagagcggatgttggcaaaaattaaggagacaacacttgctcctgatgatgaaatctccaggaacattgtgggtcttgcccgtaccaggccagacatctttggaacaacagaggaagaggtctctaatgctgtcaaggcagaaattgagaagaaaaaggatgaacagccaaagcaggttatttgggatggccattctggtagcataggtcgtactgccacacaggctctgtctatgggcggcgaggaacaggttgatgcttcgaatgttcctggtccagctccacttccccgccctcccatgccattgcttagacctcctcagccacttccactggttaatgttccacgctttcaacctagtgcaatgccatatcccccacaccaacaacctcatctcatgcaaggagttccacatatgatgcctaccatgcatccgcctccaccaccgccaataccaggtcagccgcaggtgattaggatgccaggttcaatgggtcctatgccaaccaatatacctccgcctccaccaggccaaaatccctacatgcctggcccgccgcgtccatactccatgcctccaccgccacacatgccaaccatggcaaccatggtcaaccccattgggattcctcagcctccaccacctttgcctccacaaccacctgctgaggagcagccacctcaacctgatgaaccagaacctaaaaggctgagaacagatgacgcttctcttataccagcagaacagttccttgctcagcacccggtaatacttcttgatatatttcttctccactttcctgttttctactaaacattcttgttagtcttgttctttttgtatgcgtatattgaattttaagaatttccatgtgctaatttcttctcttccctgcagggccctgctcacatctcagtgtctgtacccaaccttgatgaaggaaacctgcgaggccaagtgttggagatcggtgtccaatcactctcagacacagttggcagtctaaaggagcagattgctggagagttgcagctccctgctaataagcagaagttgagcgtgcggactagtttcctcaaagacaatctcactcttgcttactacaacattggccctggagtggtgatcaatttaacactgagggagcgtggtgggagaaagaaatgagctttcttgtatctcagtgcactggcaggttattgcttgcaactgaacttgcagctataaaggagaatatttttgttggttgctgcctattaatttctgtattctcatgttatgtttaaacgtggtgaaacactgttatttgcactatttgaatgtcagacatacatatctctttatggccatctgttacttaaaatatatgttttagcttctgctgttttgctgttgtgaaatgtgcttgtcttgaaagttcactgcctacttgtcatcttacaagatgttcactatttgaatgcttgcatgttattgtagatttttctgtactgcatgggtgaaggtcttcaagagcttattataaaggtctggtcaagatgatgattgttttattgtatatatacctctaacattgttagttactccctccgtttcataatgtaagactttctagcattgcccacattcatatatatgctaatgaatctaggcacacatatatgtctagattcattagtatctatataaatgtgggcaatgctagaaagtcttacttatgaaacagaggaagtatattgacttgttgatgatgctcctgatgttaaaattcttcctttgacagaatagcatggttatccattagatcgctgctgctggaatattttatgaaataggaaaagcttttagttgaaggcttaattatgtattttctctaccttcattggtctaatgccttaagttttagacgaggacttgcagaacagaatgttgtatgctaaccaaattttgtcagttactttgtattttctcaaggtgttgacattccagttatggtgttaccctatgctttttgtttcctcacctgcacatatttaagttttttgttaagtggtactgtaccattccatgctatttctatttagcttttctttttcatttgcggttctgagtgttgcggatgcagaacatgacatgaaaacccaagttattctatatgcttttgttttcttgtatggagagctatatgtattatatatattattattattcagaaaaataagagttttgagtgatgcttgcgctgctttgttcatgctttcataaattcgacagggccacatagcttgcatactctaatcccacaaatacatattgtttcgaacattagcattgaacttacaggacttgaaagtattgttggcgaatctgtactttttctccattcaaattgaaacatgttctgtgcattagactattatgaaggggaggttgtaatttctttttgtgtacaacagaccagtttatatggtgtaccattatcttttagagaagttttgatagtctcaccagctgtttttctgtatatttctggtatttttttgttcaaatgtttgaatagcacagtaaggcatgaaggcatcatacttgaccatgatttctctcttttgaacatcactgatggtctgatgcaactgtaggtcaaatttttgcctagtagtctctggccaggagcccaggaggccaggagtgagttttcttgttaatttttgaattttttccgacacatccgttatttgacatgtgtgtgtttttttagatgctgttttcagccccaaaagtgacaggaggattctgtgatccaatgatgtagccggtcaccttatctttagttagttctttaggtgctctgcgggttaaggcagtaggaggcaatggttctaaaatactgacatggtatgttgctaggaaacactgtgcgacggaattttggtgtatacatggaacgttgccatgtatattatctttacaacacaatgtggaaatcgataattatctttatattacataggaaggctcaagcgctaatagcattctatatctgttatattgaatgtcatcatctaaatatattttgcctcttgaatattgtggctgttgcttcttgttttctaaactgatccaggttgcatcttgttttctttaacaagtgcagttttctcctcttgttacaactgcagcccagcctgtcgtgagctgtatcttgtccttctgtttctgttattgggattcatggaagtatttgctggtctgttttgacgatgtggtaactggtgagagcaccaaggaggtggttgatttatggatctgtctgatggtctcttgtgctgatgaatcagcatgtatgagtgaatagtgggatggataaaacaagtgtaatgtgtaatgcgtaatgatgatgtatatgttctggtcttcacctgtaaaataatggcactgcgaagatcatacttgtcattttacattagcagacatgcaacgttcgatggtatcttcatagccgtaagacttgtgtgtgctgataattcttgctagcacatgtctgtatagcctgagaacgttcccatgaaaccttatcaccaccatcgtgtttcatgtaattctgaaattgcgtgtttcatgtatgatcttaaccttcttgccgtgattgcaagtttgcaacgagagaggtatctcttgtcagcacgctccactactccagatgccagaactcagcagattcttttatcaagtacaggaatttcatttgaaggggcatatatgtaagctagagtttttaccatcaatcaggcatacattcctgtgcaataactgataaagttcttatcaatcaggcatacatacctgtgcaataactgatcaacaaacaataataactgggcagcaatcctgaacaataacatcctgtggtgcaatccactactccatacatatctacatatcgaacatcagaatggacgcaagcagaccaggagatagataggagtataggagtatacaattgcaacacgatagataggagtgcacaattgcaacacaaacagatagatgcagtgccaatttggaatttcttctgtcatttcttagtgatgttgttctggtcttatgtgtatctatcatgccagtccaatttccactggaaaaaaaaaggggtaagttgctgcgtgagcgatctaggcatagtaggctcagaaggaaaatctggtagaacaggtcaattactttatccttatattgatatcagtcctgcaaatacacagccagtagatagcttatcttgatatcaataataaaaggaaacgaaatctgggtgaacctaccctactgtagtatgtttttgctaacaacgcatgttgttttaccaagatatccctgcaacccatgccttcagtttgaccaaaccaaattcagcatattcctctgaacaatgcatataccaagcaaactatagcaaacattttaactggttgacattagtttgtacgaagtaccaattggtatcttaaaattatattaaactcacttttttttcatcgcatagcaaatacttcaatatgtataatgacagcaaaaaggtttgaatgcatcatgctcaaaacgtagcaactgaaacaagataatatattctgacttcaacaggtttgtcaattgtagaattgatgctacactgttttgatcttatgaagtaaatagtagtaatttgtttggccgataataactgagagttttttactattgtgtcaaggaaaatagtggtgtcactcattacttgtgagatcatcagaagaggaaatagaacaaacaatagagttgagacatcacatgcctagtgcttcctccgtccaataatacaagagatttaggccctatagtttgtcacacaatataagggatttttgtgatcctaagacaacactttatttcccatttatcaactcttgtactagtttattctcccacctatctattcttgtactccctccgttccaaaatataagtggatgtgacacatcacaatacaatgaacctggataggcttcctgtccagattcattgtactatgatgtatcacatctacccaaagtccctatattttgggacggaggcagcactgctttattccccacctatcaactcttctactatttatcctcccatctatcaccttttttactattttatcctcccatcgatacttttgtactatgaaatgtattttttattacttccttaatttataccaaaaatgacatagtcccttctattatgggacgaagggagtattgattattgaacatatactagatactcctttgtttcatattataaatcgtttgacttttttcttaatcagacttttttaagtttgatcaagtttgaaaaatatagtgacatttccaatgcaaaacaattattgtatcaaaatatattcaatgttagatttaatgaaactaatttggtgttatagatgttgctgattttttctataaacttcgtcaaacctaaagaactttgtctaagaaaaaagccaaacgacttataatatgagatggagggagtagatggtaagaattttccacatagatgatacctcttggaaattcaatgttttgaccaacatttataaaatttaccacgtacaagtagctgaacaatcatataatgtagaaaaatgaacacacataatgtaaaatttaacctttcgaattcaaaccattactcagtacagttgagatcatctattgaggtcagaaatttgcagaagaggattcagcgcaataatgtttgtattacttaacagtcatgtagcaggaacaaactggctcggccaagaatgctaaatcaagcaacttatgctacagacattgtgtgctatgctaaatgtactttcctttattccaacaatatttatgttgagataagctggcaaatcttgtactattatgttcaacaactcacacacccatgtcaccacatgcatgcttaaagtatatacaaagcacccgaacattttacatggttacatcccaatcatgacaaatctactctaactgaaccatctcattgattgttcaaataccaggcatagttctacatacacaatgttcaattattcaactcatgttacaccctctagtaacaaaaacatcttgtgttggacatgtctcaagtcaaacttttgagaattattcaacccttttatactgtatacccatacaattattcaatctcttttactacagttatttaatagggttatatatttgttgaccatacattctattaaaccacacagcacaattactaatctcttgtactgcattaaattaggttccagagtggatatgttgtgatagctagagtgttggttttattattagcagacaaaacattgttaaacgttacaaacgtacatcccaacaaaatggacaaacactgtggtacagaaggagtaaatgaactccatttatatgttgacaatggcacgcactatttaaactgtaatagcaagatggaagattgacatacgactagattttgccactatctcaagaaggcatacaaggctattaatgcagggcaataagaagtctaagaggatttataccagctgcaaacagaattgtatacattatagattttaatgtgcttcacatatctccctatgccctagattacactacatagtcctatgcactatcggggttgtagaacccccactaatttgccctacaaccaacattatatactagcaatacattatgcactttgagtctaagtgaagaacttaacaactaggtgatttagatagcaataggatctttattgcaatttcttcaactcaaaggagttaatccacatgtattactatgaccaatgcaaaacgcaacagaaataatccatatccctcgacgtacgaaatatgtgttctccaaaggcattttgtttacattgctctaggatcagagccaaatggccacacatagatcatctcgtcccacccggtgctcgcgagcaacccttccacgagcacgctcatgtcgatcccggcaacgaattcagtgtggtggccatacctcgcgagcagcgcgtcctccttgcggtaatcccacatgcacaccgtcatgtcgtaggagcaggacatgagcatgccctgccggtgcggcgagaacttgacgcgcttgacggcgtacccgtgcccggcgagctgcgccagcggcgcccgcggcgcgcggacgtcccagacgcggatcgacttgtcgacggagccggtggcgaggatggacggatcgtacttgtcccagtcgagcgagagcacctcgtggtcgtgcgccgggatgaccagcgtgggcgccggctcgcgcacgtcccagacgcgggcggtgcggtcgccggacgcggaggcgaagacgtccgggtggcgcgccgaccacgcggcggcgtagacgcagtactcgtggccgcggaaggtgcgcacggaggccgggcggtccggggaccagagcttgagcgtgtcgtcccaggacgcggagaggaaggcgtcgcggcggacggggttccagtcgaggccgtgcacctcccgcgcgtgctcccggaggaggcggacggggttctgcgcgggcggcagcgcgacgtcgaacaggcgcacggacccgtccccggaggcggcggcgcagagggactcgtgggactccgaccacgcgcagtcgaacagcgcgtcggaggtcgggaaggcgaacaccggcgggggcgccggcgcgccccccggggcggcggcggcggagaggtcgaggacgaggaggtggccgttgccgactaatccgaagtgctgggaggcggccgcgaggaggcgctgctcgtggaacgggctgaagcgcacggagaagcccggcgccggcgccttgaacgccggcatcgtcgtcggcggcggcgaggaatcggtggtcgccggatccgggacggggatggtgtgacttggggaagacttgccccttctcttttttttttcttctcttatcttcctttctctctttttctctctgtttttttttaatttctctctttattattactcctatagctctttttttttcttttccgtttcaaagagtagaagtaaattagatttaggctgtgtctagttcacaccaaaattgaaagtttggttgaaattagaacgatgtgatggaaaagttgaaagtttatgtatgtaggaaagttttgatgtgatggaaaagtggaagttttttaaaaaagtttggtactaaacaaggtgttagcatacaactcataattctattcttacataaatattctcgagttgcactaactacatcgaaaaaattacttcctccgtttcacaatgtaagattttctagcgttacccacgttcatatagatattaatgaatctatacatatatatgtctaaatttattaacatctaaatgaatattagcaatgctaaaaagttttacattgtgaaacggagaaagtatatacttaaagcagacatagctagttagtactgttgtctcccataatccactattttacctgtatagctgttggctcatgtcttgggtgagacatgagagggacgtgggtcactgacgcttaaatacataacagtggatctcacttataaggaacacatgtttctctgaccttgctttagagaagttacgttcgatctaattgtcatcttctttttctgctgtgatgaggcacgtcaaaagagtcctaattagagaatgtgtccacaagaaaaaaaaagtaaataccacattggatgaaccatatgctgtgtttggcatcttgtgttgaaaactaatctctaagtacataaagtactgttaacgactaaatttggtaatatcagtatcgaagatgaagattagatcggagcagaatcaaagacgaagatcgtttcggaaacagagtaagaatcggctggagtccaaattggctacgaccaagatcggctgagtccgagtcggactgggtgagttgatatagccgattccgacaatacaactcggtatacgtcatcgggttgagttgatatgctttaagatgattgccatgcatggatagagtcatgagaagacaattgtatctattaattagaatattttatgtaattttcttatagatatatttgggcaaaagtctgccgcaaagacttatggtatcttagagtttgttagagataagaatcgtgtccgtgtccgatatggacatgttttgtaattcttgggtataaatagaccccgagccccatgtaatcaaactaacacacgttcaatacaatctcggtgcatcgccacactttttgctttcgttttgtttcgacgagttcttgctttcgggttgagctgcatcggtttcgatcttcaacaagaggtaaaacttattatggcggcttgcgttctcgggattagtgcttccatcattatgatactctaatcttgtttatataattcgtcgagttatcatatatcttatataatctctaacaatattgacatttaacctataatcggctaacatctgtcagtagaaggcagtcgattaggttagatagcaacgttggcttagattatatacgatatccaccactctatgaaacttccaacggcttgattgtctagatattgctcttcttttcatacttatagttgcatcagttgagtttgatcttatgagtcgtgattagaatctcaatctctagcctgcttcttggttgccgattagggtagtatcggggtttcagccgatcttacctgatttaactactttttgtcctttatgcttcgttgatatgttgaatctgttctttatgttaagatcttgttgcatttaagtatattaggcttttgtttgatatattctatttgctttgatatcttagtatagagctgtatcggagtattagccgatacatgctagatctatctgatcggctatgctacgaatataaataatctcattgttaatatatatttcgattgaagtgatttatactgtctcggcatggcgacgatctatcgcaatcacttgattaagtatatatcgatataaggattatatatcattaatatctatagccgatcgagtagatttagttctgttttatttattaatgcctgccgatcgatgcatatatgacatcggctcaaagataaatgatatgttatcagcacctagccgatcggctatcgtttatggatttaaccgcggtttctttgtctttgttcttgttgattgcaggatcaaatcaactggcacgctagcatacccgaaggcgagttttggacctgcactggagttaggcagatctcccaggtctcgtgttttcacatcaacaggtacctcattagcacaaaattaattaagtattaaaaaaataaaaatagatcaacatgattttaaagaaacttttctatagaactttttttttgcaaaaaatatactcactccgttccctaatacaagggatttgatattttgctggtactgtttgaccacttatcttattcaaaaaaatttatgcaaatataaaaaacgaaaagatgtgcttaaagtacttttgataataaagtaagtcacaataaaataaataataattcgaaaaaaattttagtgagacgaacggtcaaacaatgcaagaaaaatgttaaaaccccttatattgggggacggagggagtactatttaacagtttggaaagcgtattcgcagaaaacaatatagtaggagttagaaagagtactcccaaatgcacccatatgacaatactacctccacaatagaaatagagcctctagcttactggcatctgaatttgatgacaggtgggccccatagctcatgggctcatatatctgcgatcgatgtcagagggaagtacatcagaggagcctcttcctgccaaaatgcaggcaacactcaagtggcttttatatttcagcccttgattatttatgcttcaaccctactatacttataaacatcaaattagttatctatatctatactaatataaaaaggaagagttgtatcccttcaatcctacaggccaaatcacatctatcaatccctaccgtccatccacgtcgcacgcatcacaaccgtcactacctgctaccgcccaccgattcccctccctccaccgcgatttctgcctgcactccctccaccgcgtgtttactccgtcccgcgagatgattccgtggaccacttactcgctcctcctcgctccacgcctccacgcgtgtccccgccgcagccgcactacaccgctgcccccgccggagtcgaggccatcaccagccgctgcttcccccgtcggagtcaaggtcgtcaccagccgccactgccccgcttgagccgaggtcatccccagccgccgccgcactccaccgctgccgcaagccgccgccgccgaggtggttcccccctttcgccgaagataagcttccgttcgttagtctgctaatggaaacaatatttagttttttagatccatcctctcttgctccactagtcagtggtctcaggttttaggcaggagaaggcgatctcatagcaaggtgcaatggcaacatcataccatccctcgcaatgcctctggactaaaggcgatgctgctggatacatgttcctgtatccatgttggaggttgatttcctataagtaggttaattacattgttgatggaatcttcatggcatcaggttctactttgcaaatttacaaattattttttcctctatagttctgtccctatggactgacatatattttgtatctgaaaatgcatttggggcttgatgtggccatgcggattcttgagtgaaatatctagcaagttccatgggtgctggaaatttgaatatagcatgacatccacaaatgggcttcaggaattaagagggagccaatcaggacaagggcctcctgagctaatgttgtgtattgcaggtacttctttgtgtctcaatttaggcaagtgttgtataaaaaaaattgttaatgaagctgatatctcaattgttgtgagttgttcctatgaatacatgtgcttgagcattaaagaaacaaatgtcttcagatatgcactttcatgaattatgagagaagatatggacctcccacagctagctatggagaaacatgcacagtttagacaaaatgtcagagtgcctaggaagacatgttgaagacatgttgggtttcttttttccataaaataaattagtataccatttctacatcttggcaaaggttgtacttgatgatcttttatggccactgtaggttagttattcactgttgtctctcctttcgttggagaatgggctccatggtgcaatggctgcacttgttggttttgaacaaagttttagtattttttgcagttcatggtacttattcaactataatagccctcaagacaagcatatattctgaggtaactcattgtctactaaagttgaaaattttaatttagttcatacttatggtacttattctgctataatagccctcaagacaagcatatgtttttgaggtaactcactgtctactggagttgaaaaattaatttagttcataattgaactggtttatcataaataaggttgtttatgtatataaaatgtccagtggcgcaaaaaggtgcgtgattattcaaagatctaaagtaaagtaatcgatctgcatggtcttttgttcgtcgacgagaactctctgaagtttcattcccaggtatttttcctcctgtgatcatataaatgttatttcgattgcaatgtgagaagaacacatatgaagtccttgtggctgtaggaaaaccattgtatagatagtggagttcatctccttatgcaattgaattagccacaagttgtttatgaaatgcagcagtggctttaacaagaatggaagccttacttcttggggaacttagggtggcctgagctactcatcagttacttagtatgagtccatatccttattaggattagcatgatactgatgctccctgtacgcctgtacccagaatatatatgtgaacgtatacgttcatttttatcttaaataatagaaggttggttagctagatctaaaatgtgagcttttctatggtgtggtgccctggtatataagaggtatagggttaatgctttcagtattctgctttgtttgctatctattaatgcacagatgtctcaagccactgtgtaatttgtaaaattcatgccaactgataccaaatacagagcagtatatggtatatattttttatctaatccttgcatggataatttattgaatttgaattgggggattatccttttattttatcttgtcgaggatctggtggcaacagctctgtggctcaatagtaagaggaggggcgttgagagagcaggaagtgaattgttggctacaattgataaggtatgccttttttttaattactgactcaaatggactaataattggtgtcattatgtgtattacaatagatattatatacattatctgtgatatattcccaaaaatgctcttcatagataaaccaccgactacctcatgtgagtcattaaagttccccgattatttttgatctgtttgagatctaccgccatgggattgctaaccatggactataatattactctctaatatgcaattctacaaatgagaaatgagatgctacctattggcatttttttaccagctggagatgctagcaatctcacagaaacagtgagcatagtgattctacttcagagttgtttctttttttttaccaatgaaataaaatctgtgtagatatccttttgttcctcgggggcactcatatggagcttttttggaatttctattaataaaggtggatggtgcattgcatgttatattgtcactctaggaatagacggtgcaagtttttcagagatcattcaaattatcatcccactatggtctatggaactcaatttttacgtgaagaatttgtatggagtgctacataaaaaaggctcgcatttattattctacttttgtgtatataatatcaaaacgtgccttgcacgtacacgataactagtaacttttatatttgggtcttatgaaaaaaaaagcctacaaaaatagccttagggccccctttgaatcaaaggaattataaatgaatttcatagaattgaaatcctataggaaattttcctatgtatctctttgattcaaaggattgaagttttccaaatcctacaaaattcctatggaatggcatattgcatataggttttggaggaaacttagcaagaggtctaacctcttggtaaaagtcctttgagtctatctctcctatccgattcctgtgttttttcctgtggtccaatcaaacgattatttctatatttttcatgtgtttttcaatcctctgttttacacttcattcctatcagaaccctatgtttttcttattcctccgtttttttcattcctacgatttaaaagggctctatatatttgctaggcccctcactattttcttttttttgggaaaattggttccacgcatcgaaagtttatatatatataccatcgaaagtttgtggtgcactttaataccatccaaagttttctccattacctttctataccacaactgtttatttccgttagtttgttttttcttttcaatatttggctggaaaacaaacagattatgactgtattgcccttcctttactcatctaaatctcgcccaattttttcttctttggccgacataggcatatcgcttcatcaatggggattgggagcaacaagagcagcggcaacacaggccggagaaacattgtgaggagaggactgcacgagcaccagagcaccgcgagtgggttacgagcgcgcgcgggggagcagcacggccgacagggacggtgagctagttcccaccattttcaactcgatctcaagcaccattcatcccatcaatccgcgtaatctcgccgccggtggcccaatttgtctctcaagttagagctcctccttgtcaaatgaaacatcatatcgagctcaagctcttccctgtagcagcccccctccaagagcgccgtcaggtcgtcgtcggcgttttgcccaactttagtggcaggtgaccggcagccggcccggccccctccaggaatcgcagcgtcggtcaacgtcgtgctctcccgcgccaacccccttcctcgcgcagtggatggctgtggcggctccgacaggtgcggtggcaggaggatgtgatggagctgggcggcaatgcgtcggggacccgagacaagggcaagtaatgtcgtgtttaacgacagatccactcaagttcacggtgatggtaaaataaggcccggtttgattcagcttagaattattatagtctggattattaggagtaagctgaaacaaacaagtagattattatgctaaattatttattataatctataagccagattactataattcaataatttcctctagaagagctttttccagattattgagtggctaaagacccactacccttaaatgcctctaataatctagagaaagaaacaactcgtagcttattttatgttagcttattataattcagcttagagtaatctgatttaataatctagattataataatcttaaactgaaacaaacatgggctaagtaacgtagtaaattttggatggtattaaagtacagtacaaactttcgatggtattaaacaaaacttaagaactttcgatggcatggaaccaattttcccttgtgtaaaattttgttgaaattttatcaaaattttgttcaattcctgtcaaaatgttgctgaaatttcatcaaaattccatcaaatttaaaatcaaaaagaaatttccaaagtcatgcataaattaggggcaaaaacacaattaataaatagagatgagagaaagtataaatgttcttttgacaggtagttaacaccgttaactcctccatccaaaacatgggcaacaagatttttcggctaaaaaaagtggggaaaaacgaaaagcctaaaagataggggtaaaatcaatattgaacatgaaagtgagggaaaaaacaaaattgtcccatagcatttacatcctaacatggttattaccactctgttgtaaacatggatgagaagatgaagtggattgtaaactaaatcataatcatcatggaagattcctatctactccgtccaacaatataagtatttgaagcatttaaattttgtttaggaatataagcatctctacactataaattatcccatcaatctcctcattccaaaaatcaggcgccaatatccttttaatctatacttaatataaaaaggaggagttgccccctccaatgctacaggccaaatcatccggattaatctgaacagtccatccgcgcgcaagttttctccaccgcacgatttcacagccgaggattccacgcgcgaagatttcgctactcctccacccgtggccgcgaagactgcgcttctcctcgcttgctcgctcctcctccccgcatcctcgcaggagctcctccccgctgccgccgctcctccatgtcctcgccggggccgccaccgggtcctgcttcttccccaccgccgcggccgtcttcctcgctcgctcctcctcctcctccccgctgcctcgactgacttcaatggacacgagtagcggccgaatcgattcaccctctctgcggcggtgccctggtcgcgtcacctactgtatccgatcgtgaggtaactcttctgatctgcgattccgccgccactagagccaccgttgtcggacaatgatggatagttctgcttctcttgcagggccttggttgcctcccttgccatgtctcatcgggtggttcgatttgggcatcgctccgagcgtggagggccgattagagcactgctgctgcgtggctgcccagcgtgcagtcatgcctcgccgtacccattacccatcactctgtctctaccgcctgttttcatgctcctccactgcaacctgattttccttatgtgatggataacaatgcagatcgtgctccacatcagcagcttcgtcaaagaacatgtacttgtgagcatcagttccaggacatgcttaccatgtgtttgtgaaaatgccttcaaacaatttgttccatctgttattttaatccttgtgcatattttggtaggaacacccattatatgcaacacaaaatatattcttgataggccagacattcatcgtgatggctaattatatgcaacctaaatatatttcagccagcaaggatttggagagcaagcatatataattttgttatagctgcttatgtccatcaacatatctttatgaattatgatgccaaatttctatatgtttttcattatactgatatcttcttcatgtttatcgtactaaggttgtttccaagtttatgtaagtgtttcataaccctgattctgcaatgtgacccaccgtgtacttattagaagatcaaagtaactcagtttatttactccagtgcattgtttcttcaggtagtagtcgatttcaactttttaataattccacaaacagggatcatttcatttgctccgtacagagagttactgaacaatacatcatatgtgtaagtgtaacattttcatggaccatctcttcttccatttttcttgaatgcaatgtggtatatataaagcatcctagatatatctgaacaatataaagtcaagcattgcatgattgtttttatcttacgtttctattagatagccaattctaatgaaaactctatttttttattttgcaactccagtctgttccatcatgaatatgtgcagatatgtattcaagacaacctacttctgaattctgatgttaagttgttgacagcaattgagaggtatttaaagaatatgatttgtgacaaattcattttagtgaagatcagcagatcagcaatgctcttaatctgaggtacaaatgcacacctacttattccagtattctctgttgcaaataatgggggtgcttgtggttaaattcttttgtttaatcagtagaggttagcatgcattgttatagaccctttgtagaatagtagttatgtttagttgttgcacttacgtgccatattcatcattttaatggaattattatgtttagttgttgcaattacctgttatgatgccactgctcggtaattaaatttatacatagttcatattttgttgaattagattctagactatgaaatattccatgttttgggcggtaaaccttcattataaattgatggatcctctaaaaggttgatgagaatcatcaaaccttcaaagtacctcataatttcttttattctcacagatcatattcattccggagtaacatttttgatatattcagtctggttgcactgaatattgaacgttgcttccattatttgatctaatgactcagattgtagttgggtcctcaccctctaatctctcctgaaaaatcaatttgattctcctttaccgaacggcagcaacggcttctgttgatccaggtagtactattccagtcaattgagaattttttgaagatcgcatgaaaatgtgatattgcaagggaatgtacatatttgagtttgtaaggaattcttttttgatatttttctatagatgacccttgcatttctgaatcttgcagttccatgcaaaatatcttatgaagctctgtttcttgtaggtatgatgcattttatgtgtgcaagctcatatataatcactacggtcgttgttatttttgtttcatgtgttccatagtggtgcctctgagccctatattgtgattgatttgtctcaccatatcgactttccttgatcctttggtgagctaccatctgcattatggcaatgcatttgcaactgaggtatgatgatgcttgcatttaaatgtttccgaaaaattaaacaaaagtttcaagtactgaacattatttttttcccataaattaccatattaaacctctttattttgcttaaattcagttcaagttcttaggtgtaacaagttttttttatataaaattgcattaaaaattgatattcccaaataacagtgtttagacttctgagtagtgaatgtgggaaataaagacgtgccttgcacgtgcacggttactagtctccaatagtttcccagtagttagatcccaattatttcgctgtttggcagacaggtaatgtgggttgggaccgattgttatactgttcggcagacatcctctcgtttaatgcatgatatttttaaaaatagttatatttttttaaaaaaaatcaagataaattaatatatgatatattacacgttctattcatagccaaattttttatttttgtttttacttatataagttgaatttaaatatgcatgcttgtaaagtaatatatcacatattgatctatcttatgaaaatttttagtgacttttttaagcgacataaaaaatgaggggacatccattttaagggatgaatagagtttcccaaatctattctgttggtggcgcaagcatgatccggttcaactgcagtggcagcatcattggatttaaatcagaaaggatattgacacaacacccgtttcctaggaaactcttttaagcagtcaggtggacgtccacctgtttttttcatgtgaactaatttgttatagaaaaaaaatcaaaaaattgataagatagattaatatataactagttgtatggcctgcgcaattgcgcggctagcacctatacaaaattatatatttttgtatgattttacttaaaatttaataaataattatctcgttgtattaagactttgaaagaccaaaccttatcattcccgtgtttctaattttataatttttaaaagttacaccagttgctacccgttacttctgtgatatccttctttattagcttgctcgatctatcactctttttattcattttctttgaaaccttttaaaattgggtcttatagtttttagagtttattgtcccattgggttttgacgttttgtttttataattttctagaagtcccgtcaaatgctgccattgtactcctctacggtccatccactgactcttctctttattgtcattgatattttaaaaatcgaacataattatcgtttaagtttattttttttactttctagaagttcagccaaaacgtcagcgacaaaagtcactctactccaatacggtttgcccgctgcttcccttttttattgtcattaagattttaaaatcaaacatgtttatcattgtttttttttactttttagaagccctaacctcttaaaattggaccttatagtttttataatttactatctcgtttgatttcattttttataatttttagaaatcccgtcaaacgctaccattatactattctacgacccgcccgccgcctacccttattatcattgggattctaaaaaccaaacataaatatcgttggaattcattttttactttctagaagtcccaccaaccatcggcggcttgccattgtactcctgtatgacccatccgctgcctctcctttttgtttcttgggaaactcttttaagtagtcgggtggacgtccacctgtttttttgcatgtgaactaaattgttataaaaaaaattcaaaaaattgataagatagattaatatataataaatcactccacaaacatataagtttaaattcaacttctaaaatttataacaaaaataacaattttgattgtgtgtgtaatacatacatatgtatatgtatgtatgtatgtatatatatatacacacacatggtgcccgggctctaaggtataaaacacacaaattctctcaaatttttaaaaattttcaaattgtgagtatatacctaggtatatgaatttgattcatacaaatacctaacaacaaaacaacttaaactcaactttatttcacaattcattattacatacctaataaattatatgtttggatattatatacctagaaccaaaatctaacaaaaaaaaagtttaaactcagttcaaacaagtttgaacttgttagtaaagaagttaatgttcatatctaaacatttaaaaaattttcatactcattcaaattgagtatatactcaatttgaatcttggagcccatactccatatagcaccagttaatttgcgtgtatatatatatatatatatatatatatatacacacacacatacatatatatacacacacacgcaaaatgcccgtgcttcgctacgggtaaaggaacggttaaattcaataaagtacaccattaacatgtataaaataatgttctaagataggtaaattattcattgcgctaatgataatcaagatggataaaaatattcctgcttagctcgcatcacgaaagaaaaaacaagaaaattgaattaaaacatattaaattctaatttaatgaaatataaattttctgcaatattaattacactctttgaaattatagcaaaagtggtcgagcgttgcaacggaaagaaaaaaaagataaaattgaattaaaacatattaaattctaattaaatgaaatacaaattttttgaaatatttgggtattttttaagtaggtaggtatataattaaattaatttataagtaaagtaagtgtgagaaataaaatgttatggttggaaatatttgggtattttttaagtagttagatatataattaaattaatttataagtaaagtaagtgtgagaaataaaatgttatggttagatttaattttttattaaattttctatattattaattacattcattgaaattttcttggaatttacgtagcttaattgctaattctgataatacaaacatcattttagaatttatttaaataaaaataattttatctctataggcctatttcagcccactttcttcttcagccatcgtccgcgaccaaagtctaatttggatccctatactcttcctcaatcttcctggactgccgagccgctttcggcccaagtggggcggcccaacgctcgatcgatctgagccgttcgttttgatggacggctcagattagttccaaagtgatgaaaaccctaaccctccccctccccctcctcctccacccagccgagccggccgcctcccccgcccctaacgccgcctctccccctgcccctcaccccacagccgccgcttcccctcccccacagccgagccggccgcctcccccgcccccgacgccgcctttcccgctcccctccggcggccgcctcccccgctccctacgtcgcctcttcccctccccctctccccaccggcgccgcttccactcctctcccctccggcggcgccgctccctctccccctctcccttccgtctcaccggcacggcacgggtgacggcggcgacggcggactgctccctctccccctctccctcccgtctcactggcacgacgcgggtgacggcggggtgcggtggcatcatcggcgtccacgctccctcggcgacggccgtccttacggcagcgtcgacggcgacgacgggtgcggcggtgacggcggactgctccctctccccctctccctcccgtctcaccggcacggcgcgggcgacggcgaggtgcggtggcgatggcggggagcggcggcatcgacggcgtccgcgggtagagccgccgctgtcggatccgcctgcggtcgccgccaccgctgacggatccggtagcggaggctccctccgtggtggcgtcggcggccgccgatttttttttttttttgcactttttttatcgctattgctaaccaactcggattttgtatggacgaaaaactgacgaaaattagatgtgatgaccggaaaaatacgaatatttatattatatatatatatatatatatatatatatatatatatatatatatatatatatatatatatatatatatatatatatatattttgctgatcggtttgatcatttgagtgtatgaacttaatgggtatagacccgtttagagtgtaggatttaatagcgaatggatttcatatatttgaatagattgaaaaaggaattaatgcatttatatgcatgcatgcagtgtggatgagagaatttccataattgcgtgtatatttcaaaaatggaaacattaaatgcctgcgaaattggaaataatatcttgtaaatatggaaacttacatgattgcacggtgaggtttgaataaatggtaatatagtggtgaaaaatggaaactaagtatttggaaacatggaagctaattaattggaaatatatttggaaacatggatactatatatcgcagcacatttatatggtaatgtagctgtacgaaatcattccattcatgacgccattaatttagctatttgagtaacaaaatatgcactgcggatcactttccatgtttaagatacacagcttgacatatactcaaaaattgggtatgaaagggaaaaaaatcccatgaaccaatataccatttctgtgagtatgaaaggaaggaagtctaagatcgacatgaacaaatatgtcatatattatgtattcagttagtgatataaacttaggtatagatgtacataatgcctaatcgattgattgaatatatgctggacacttgacaaatctattatttattgtaaaaaaaaagtctgtatatacaagatatttgggtatataccgttttaaacacacatactattacgatgtgtatatatatacccatttaaaatgcatatcttggaaaaatacctacttctcgttgggtacatacctacctaaatgccgtgaaaataattgatttcaagaagcttacttttttttcttgaactgaatttgaaactagctaggccttatattaatttttttctactctagctaggtagctgaccagatgtaattagatgacatacacacatattgagtatataaacacgcatattaattatacagatgtaatgagtatatacacaagcatgctaaatacacacacatgcatgagtatatacacatgcatattgagtaaaacattcgatgtatacagacactttgagtgagtatatgctcacgttgagtatactcacacacacatgcatattgagtacaagaaaacatcatgatttatacagagtgagtatatactcacattgagtatatacacagtacacatattgagtatatacacacaaaaaaataaaattgatagatggaagagcatcatcgtgattatcgatcatggtcattcatctgcaattctccaattctccatgcacacacgcattatattatggagccccagcatcctgcaaagtgaaaatacatgtactattattgcctgctataataacatattttctcatatactaatccagatctacctagtgctctaaaacatgcatgcaatgcaggctactcgtcactgtgattggccgctggatatatatatacctgcaataggtgctgtcgatcgaaccgacacaacttggagacgacgagcctcacggatgaacggcgacgaacctcgcggacgagtcgacgaccagcggcataacggcgtaggtaacaatgaagcacgaggccggcaacaaaccatcagctggtcttatatacatagaaaaatggaaagtgaaaaccatatacatagaaataaatcaattcaacatgatagagaaacggtgtgagcaggtgctaaaaggaaagtactcagtcatatagaaataaattaccatgcaatcaaaaggaaattattgcatacatgtttgcttatatggaaaggaaattagtgcatgcatgcaaagatcttatatggaaacacggccagagtattatggaaaggcaatcacgccatgcatgaagaggtctaatcgggtttaacccgttagtatgtctataatactctgatttgagtagcacggatctcaaagcacgtatacggtggattttattggagcccctccatgtagcaccagttaatttacctatatatatatatatatatatatatatatatatatatatatatatatatatattgctacgtagcgccacacacaagcgctgcgtgccatggaaatatatgacgccactcacaacgagaaaagactgcccaccaaaccaaaccaacagactgtggagttaaaaaaataacttgtgaaaaacgttgcgcaacgtgaagcaacgaaccctcgcccaccggaccaaacaaagctgaatgcgaagttaaattttaactaatactatgttgagtgatgcgctgcagtgatttcgttgtcgagttaaaattttacctatgtttcagctatatgaatgagtcgccattaacttaaattacgggttggtggttatgtagttaaaaattaaaaatttactggtagacgatgatcgctgatgaaaaataactattttgtagattcttttttttatggatgtgtgttgtttctcatgacaaggaatgcgagttaaattttaatttatcgtaaactggtatgagtagatgaaaaactttgagacattaggcggtggtggcgatgtgtgacgtaatacaaactttattattagaattttattgttttgatgcacatctccccagaaaattacgtcgatggaaattaactgataattaattcaccggatagaaatcaactccatgtcgccggatccgccggtccagaaactacgaaatcctagcgtgcattgatttggcgttaatttgataagcttttagaggaggccccggaataagcggattttttttcatgcgatacatcctgttgttgtggataatgaacagagtcctagatccgaaaataatgcttgtacacctaaatttagttttctctccacagggaatggaatttctgtttcttttaggtatggtcagattcaattctcgtacatcatttagttacttttaccgacaaattacatatagtaaatattttactccaaacattacatatagtaattttttaattgtcaatatactgatatggagattgcatttttattttttgcaagatgtccggatgcatctaatcatataggaatcacatgtattagaaactaattacacacaaataatgcaataacacatcggagagatcaaataacaggacaacgtccaactaaaatcaggaaaaataattgattgatggtgttgttgatcctggcagctttcttctccttctggatccgtcgaatgaaaaaggtggctcttggtggtttccatattgagaacggaaacaacgggcggtggccgcttcttccaccggtgaagaagatgaaaatggaaaactcggagagaggcatgctcggtgcctccgtctccatggatgcccgccactgctccatggatgccggaggacaagctcaccgccgcaatggtcgctgccgtctcgcctcttgcccatagtcttcacccttgcaggtccacacgggaggaagggggcgctggatctgtggacgcgcagcccacaaccgcgccggatccgtgccgccgtagccggatccgcgcgcatggggcgcagagtggtggccaaatccgccgccgcatcgcctcccgcccacagtcacccgtcgacgccgcacatgccaacatcgcgcccgtcctcgcaccccggcaccactggatccgccgctcctcctcctcgtcactcctctcatcccccaaccaccaccgctgctcctcctcgtcaccaagccatcaccggaaccacctcgctgccactcctcatcccctaatcgccgtcgccgttcctcctctctgcacaaggaatcacaagtcatcgctgatccgtaaaatgtggagaggaagaggaaagagtgggtggacggtttctatgatgggaatccgtaatatatatatatatacacacacacacacaccagatagagtcagtatgtcgagttaaaatttaacagtgtggtatgcatcagatcgagtgcgcgtggggtgggtagctgagttaaaatttaactgtgtggtatgcaccagatcgagtgcgcgtgggggacgggttgggttgtgggtcgcagagttaaaatttaacttgcgtgtggggtgggtggttgagttaacagttaactgtgtagcttgcaccagatcgagttcgtgtgggggtggcggggtggtgggtcgttgagttaaaaattaactacgtggtctatttaaattgaatgtgtgggcgtggggaggggggttgattgtgtcaggcgccatctaatacgtggtgcctgtagcgccatatagtagttatatatatatatatatatatatatatatatatatatatagctagagtttaatatgttattttgttacaacctgtagatgtcgaatttgaatttgtatatttgtagagtgatatattacatattaatctatcttgttatttttttaatttttttcataattatctattatattattaaaacagctttgaaaggaggcaccacgttcgctgtgggggctagaaattcccacattaatcggagaaaaagaaaaggagagtccaaatagaaatacagtttaaaaatagctgaaattcgaaattaaaaataagcaatatggaaagaagagtccgtataagaacctaatacgagattaatcaaaatctagaataaaaataaaataaaatctgaaattagaaaagaataggagagtccaactaggaatacaatttaaaacaactgaaattcgaaattaaaaataaagaatattgagagaagaatccgtataaaaacccaatacgagattaattaatattcggaataaaaataaaaataaaatctgaaatcagcaaaaaagaaaagaagagttcaagtaggaaacagtttaaaattaactgaaattcggaattaaaaataagaaatattgaaagaagaatccatataagaacccaatacaagattaattaaaattcagaataaaaaataaaataatatccaaaattagaaaactaaaagagagttcaaagtaggaatataattttgaaacacctgaaattcaaaaataaaaatataaaaatattaaaagaaaaaagattttttaaaaataaattctgaaattataaaaagaaaaaatattttaattaggaataaatttataaataactaaaattggtgataaaaaataaagactattgaaagaaaagaccatctaaaacacataacgagataaattaagtaacatgcctataaagaaatagagtggtagcggttgatactacatataaaaattgttaataaaacaccaaatagaatcctaatgacgattaaaaggagggacgacaggcaggccgtgaagtaaacgagcaaggcgattgccgggacttctagaaagtaaaaaaataaaccccattataatcttattcggtttttaaaatctcaataacaataaaaaggagaagcagcgggcgggatgtataagagtatagttgcagagcagccgatggttagcgggacctctagaaaataaaaaaatgaattccaactatagttatgttcgatttgtggaatcccaatgacaataaagagtaggtagcggatgggccatagaggagtatactggcatcgtttgacgggacttctaaaagttaaaacctaacaagacaataaactctaaaaactacaaggtccaattaaggttcagaacttctaaaaagtaaaaaaaaaactaatgataatcatgttcaattttaaaatctcaatgacaataaaaaagggagacaacaggcgagccataaaggagtacaatggcaaagccgctgaaagtttggtgggacttttagaaaataaaaaatgaactcaaatgatagttatgttcgatttttaaaatcccaataataataaagagaaaagacagtggacaggccgtagagaagtataatgacagcgtttggcgggactttagaaattataaaaacgaaacccagtgagacaataacctctaaaaactaagatccaatttttaaaggtttcaaagagaatgaataaaaatagtggtagatcgagtaagcaagtaaaaaaggatatgattgaagtaaggggtagcagctggtgtgacttttaaaaattatataattagaaatacggggatgataatgtttggtctttcaaagtcttaatacaatgagataactatttaataaattttaagtaaaatcatactgaaaaatattgtttggttgctagccacgcaattgtgcgggccacccagctagtttagttagtatacgagagaaacgggtggacgtaacaacaggagattagaacccatctcccgggtgtatacccacggggcccaggtacgttttttttttttttgaacttaaacactttattaccactcaaaagcatagaacatgctgaattacaaagttcgtgaggttgaaattgtctctaatgttatttgcatgacatcctgtattgggataagccaggtgagaaatgctttgacagacataaacagtggaagagggtcgattagattttgcttcttctgctagtctgtctgctaatttatttatctcctctcggaatccaaatatccaattgacctgcaaaagactttctggaactcttgtgcaaatttggctccatgtaggcttcacactccaatggcctggctccaaatctaagtttcttgttttgatagtgtcagcaattgttgcatcatccgtactgagaaaagctgttcctgcaaatgattaagaacatggccaagaacaggtacggtaggttacacaccaacagcatccggatcgtctccggcgagctctggtctgtggagcttgtcggccaacacctccatgcccatccggtgaagcaggagccaaacgacggtgaggaactcctggccgctgacacccaagctcttcaagtgtagagacccgctgcatctgctcgcggagtagcatatcatctccacccacaccccgccgatcaccctcagcctcttgccggcatccagcttcatcatcgcgccggcgagccgccgtgcgtgcgctagatggcggcctcctcctcctctcctctcgagaagcctgctgccagctccggcttgctcctccgtggccggggtggagtactcgtcgtcgtcgccgccggcgaggcatcgcgcaaggtctctctcgctgggctgttgctgatgccgcccctggtgtctcaaggcgtgcacgatctcatggtgggccgccatgaacaggctttgtctggtgccgagcatcagcatgtctggctggtacgccagcaggtacatcatgtagttggatatctccatcacggcggtgacctcgtcggcgctggcagccggtgacgatgagatgtcgatgtcttccgtgcaatggaggcatatgtccgtggcgatgtgccagatgaggacagcctcgtcgaacggtagcttggccacgctccatcccatctctccgtagcactgctcccgccggagagtccactggcctcgccggtcattgaatctccggtaggcggcggcgctgcgcagatcatcctccacccacccagatctcaggtcctcgcggatgagatctacggctttttcagtcgacgaactatgctcaacatgataccagtagtgctggttgttgcatctcaaaaacatggctactctactcaacactgtttgacacgtatgaatgagaggatatcttctcgagagattagaatccatttcccttggccatcggctgtgggaagcgcagccgatgaggctgaactgcgcgatagtgtgctttatttgtggttctagcttgcacaccggccacttatggtagcgcagcgaaatcatgttactgaattccactacgaattcagagtatagaaggatgtaggttaccttgacatcgttggcgtcgagcccgtctatgttgctgtcaagcccgtcaaagcctccgatggccgtggaggccagcatgaaaaagatgaaccgcaggaatacgaaccagatggcgaaggggtaggcggcgtttctgctggtgtagaagatctggaacgcataatccacgaggtcgcaaagccggcagtatgcatcgtagggttcgagcttcaagaacaacgagaggtagctaagccggctagtgtaggtatttgggaaatcaatgaagagctccatgaggtcgttctgatactcgagatctatgaggtccagctgcagctcactggtggcgctacgatggcggcgagccgccgaacgattctcgccgccgccgccgtcgccgtcgtcgttcgtctgaatgttcctggtggcttcgatggcggatttactcgcccactgcaggtatctctctaacgaccagttggcctctaccgccgccgccttccggccgacggttgctatcctcgtagcgctggctcgccgcagagcccagagcatgagacccatcttgaggaacccggtgacgaacagcgccaccgggcagcgcgccggcaccttcccgccggaccatgacctgcagaacacgtagacggccaccgcggcctgggacgacatggccaccgcgcgccgcgcccacagcgcgttgtcctcggcggcgtcgtacgcggttatgctgtcctgcgccccggcgaggtggatcaggaagacgggcgcccacagcacctccagcatggaagattccccgcggccgccgtcgtcgccggcgttcttcccgtgtcggctgaagatggcggcgaggccgtagatcgccacggcgtcgctgccgaggtaggccagccagatggatgccctgaggatcgccgggatccggtgcttgcggaaggtggccgagaagaagaggaagcactggaggaagaggctggtgagaacgagcacgcgcagctgccattcttcccaccactgcaccatcgtcccggccggctctaccattcttccattggaggaaggtggcaaggatgctactgccatcgtcttcctcttgatctttattgctctcgtcttcctcctctccggtcaatgcctctttcctcgatcttcgatcgcatatggtcgcttgagtgcctcgtacatgcagtctgtgcccacgcgctatatatatggtcgttgctggccacgtgaaaatttgtgcatcagactatacaaaacgatgggcgcgttgctggttctcgatcgatcgtagctactactagtgctgttttatatgtaaagcatagtaaattactaatatactacccaatttgtaacgtgggttgacattctctatttctcctttgtgtatgataatagtcaatagagcatagtatgtgaacgatgcaaacaaagtgaatccactataattctagaaactccattgtatatcatcgtgcttcttagctgaactgccatcactactacaaaagtgatttttctatacgagaccctataatttttataaacggaccatgactagtgacgtctgtaaaaatcgagcggtattttcacagacggctccttaatgcgcccgtacggaaaaatcgattttctcatacgggactcttaagaggtccgcatgtaaaaatgacctcatttttgcatgcggctcacttaagcacccgcatggaaaaatcgatttttacatacgggcgtcttaaggagctgtatacgaaaataaaatttggaaaaatttaaaactagtgtatcttactcatatgaactctaaattggatgattcttttttcataaatgtttctaaaatcatgctctatcacattattgtgtttttactgttattattttggccatttcttgttgtgactttgttttatcaattaaaaatttgaattttaaaacttcaaataatattatgaagcagtaaatgatttcagctgaaaaagtataactcatcaagatttataacttctattttggtcatttcttcatccaacaaagtgatagtaacattttcacaaaatttacagtttataaaactatattagagatatgtacattttgtgaacaattttacaaatcactttgtgggatgaagaaatgaccaaaatagaagttatatatattgatgagttatacaactttgttattgatgactttttcagttgaaatcatttagtatttaaaaatattgtttgaagttgtcataatttgaaattataattcagattgttcaaacaaagtcatatagaaaaataaaaacaacaaaagttatagatcttgataagttatacaactttgttgttgacaacttttccatttgaaatcatttactacccaaaaaattatttgaattgcttatatttttaaatctcaaattttatatagttcaatcaaactcggatggagaaatgaccaaaataaaattggtagatctcaacgagttctacaactttgtttttggtaactttttcatatgagttcatttactatcataaaattttattcgaaattcatttagtggttttttccctactcgccaccttaaaatttttcaatcttctcctctcttctctcccaccacgaatattttcccctctcttccttcaactctatctctctctcattctctcctcaacctctccctctctctttctctcgcgcatgcaggcagcgccgggcagcgggaggcacggctgatgacgaggcgctgggagcgggcgcccgccaccgccacggcctccgggagcgggagcggacgctgtcgcgggcgtccacacatcctccctaactgccggaacgacctcgccgccgcagacgacgctgcgggcgaactctcctctgccctcgctgccgcgggcgtccacgcctcctccctcgccaccgcggttgaccacgccgacgtcgacggcgacggcaacggcgagagcggtggcggctcgctcgggagaggccgggacttgtggatccagccgaggcgagcgacggcgagagcggcgatggctggctcgggagcggcaaagcggtggcggcggcggatctggtgtcgggccctgcaatggcgtggatctggctcgtccggcggccggccgcggtggcgcggatccagcgtgggcggcggccggcgaccggctagggtttcgcctttttttggatttttattttttttttgccaaaaatatctttgcatgcggttggctcagggaaccgcatgcaaaaatcacattttcgcatgcggttgctctagccacatgggaaaatagcgattttcgcagacctttcctcccatacgggctggccaaccgcataggaaaaccgatttggctcttctttgtagtagtgcatcttcctcttgatctttgctgatgtcgtacgtcttcctcctctccggccaatgcctcttaggtgctgcaccgtataattacttgttgcatatatatggttgcttgattgtctagtacgtgcagtctgtgcgcacgcgctatatatatggttgtcggtaggcacgtgaaaaattgtactccctccatttttaaatatttattaacatcgttgactttttagcacatgtttgaccgttcatcttattaaaaacatttttgtgaaatatgtaaaactatatgtatacatataagtatatttaacaatgataaaaaagaattaataattactttttttaataagacgaacggtccaacatatttaaaaaagcaagaggcgtcaaatatttagaaacggaggaagtatacgaaatgatggacgcgttgctggttcatgatcgtagctactactagactcctaataccgttttatatctctagtgcttaaaaaatccgtagtggtgatcttgattcctgacacagcagacgcatctgacaaacacgcgtaatctcaaccatcacgtcacggatagatctcctcccaacgcccactcctccttcctccacaccgcgtctttcgctctcctccctgcgtcgcctcctcaccccgccgccgcgttgcctcctcaccagccacgcccgccggcctcctctccagacccatgatcgccgccgccctctccaatcaatgacggtgactccaacctgacacaagattggatcgcccctccccaccgcgctgctcctccctcctcagtcctcacctcatcctccaccgctcccgacccttccgctccacacccgattctccaccgccgccgttctcctctaccctctcagctgccgccaccgccagggaggtgactcccccatcgaaccacgtccccaggacaccgacgcccgcctcgttgatcccctcccatctttcgccgctcccctcgccctcctccatgccgtccgcgccacccacgatctctgcctcgatgaccgacagccgcccacgatctccgcctcgatgaccaactatgcgccaccattcctcgcaactccctctagtcctcctccgcgtcgcccccgatctctcctcgaccgtctctgtgccaccgccaccacctgtctccgccgagcgctgttgttccctccgccgccccacgcagaccactgctgtgccaggcgcttcaagctccaccgccacccctccgccgccgcccccttctccaccagatccctctccaccgcggcactgcactatatcatgccggagataccaagccctcgacaacaccattaaaatcctatcttgttcatctgcagagatgatgctcaaaattaatcaaaagatagataaattttccttaattgcaattggcagggctccttcctttcccctcgaaaaaaaagttaaattctcctcagaaaatcacctctttttagtgacacaaagttaaattcctgagaatcatatattttttttagataatggaatttatcatcccagcctttgctcaaaaagagctacagccaattattacattgtagcaatccagaaaagagcgtagtttagctaaataggatacaccaaacaaaaacagaagaaaccaagccaaaataaggagaacacatttattgaagtctatttgtgaacctccatctataattggcaaatagttgcataaccatcgactccaacttgcggcatgcaacctttaggaactccccatcatcctcacacctttgtaactgtgcccaaaaccggagccagtgcgttgccctgaaaattacctgcatatatgaaatagatggtgagaatcatatatgacagggagatggctttccatccctcaaggagacattctctcattcttgcataccacctaaatagtcataatttttttaggaaaatattgacaacatagattaatataaaatatagagtaaatttcacaaaactacatatactctgaccaaactatcacaaaactatagatttaaaaatatatatcacaaaactacagatttagtaacgaagttatcaaatattatattcattgccattcattgccatattgaggttataaaagttgtagttttgtgatgaaattgatgttaaatatgtagttttctgatatcatattttaaatatgtagtttttgtggaaaatataattttaaatctctagttttgtgatacactttcgtaaatatgtagttttgtgatatatgtagtattgtgaaatttactttaaagtatattactccacaaacatgcaaacctaaatttcacctctacaagttaaaaaaaacaaataaaaatgaaaataattaacatatatttacaattatatgtgttatttttgttataacctgttgaagttaaatttgaatttgcatatttgtgtagtgatatatttaatattaatctatcttgtttagttttataagaaaattatgaagaattagataacatgtaaaaaacgagggggtatttgctcgataggatgaaaaacactttccctaaatgatgaagatactactactcctacaatcacaagctgctacaaacatgtccttaaatgtcttttaaagaaaacatgttcgagaaggatcaataccgagattggtctcgcaggaggaaccatcgccgtcggctgctacactatcacacactttaatatttcttcgttttaagattcgccaggttctgggcctctgggacatgatgttagcgccatgtatatgtgcaaaactactttaaactaatttttctcttaaattatttatccaaattatgatccgattataccattaaattcgttgcaattaaatcttaaaaaaaggaccacacatggatatattccgacgaaaatttcttttagcttattattgatttttttaaaaatgttgcactatactccaccaagtatatcggaattgtttcattaagtagatcgaaaatgttttaatcgtaatgtttcaatcgtttaaatcgggacgaaaatttcttttagcttattattgatttttttttaaaatgttgcatgatgctccaccaattatatcggaattgtttcactaagtagatcgaaacattacgaaaatttcttttagcttattattgatttttttaaaaatgttgcacgatgctccaccaagtatatcggaattgtttcagtaagtagatcgaaaatgtttcaatcgtaatgtttcaatcgtttaaatcgggtgttgtttcaccttatataaaacaatgttcaatcgtttaaacaccttatataaaacaatgttcaatcaaacaatgttcaatcgtttaaacaccttatataaaacaatgttcaatcgtttaaacaccaatcgagtgttgtttcaccttatataaaacaatgtttcaaaccagtaatttgtggcccgggattcgaacgtgggtctctggggagatcgcacactttgctagccaatagagcaacacatatatagtatttgaaaggaatacatggagtaaataatggtttttcacttgcacttgaactggttgacccggtggtccaaccgctcgacctgtgacccagacgtccagatggttcgatgacctgtccggctttttctactagggatttgttttaaaaggatcattcactactacattagatctatatatagatctatatatagtgaaacattatgagtatactaggtgaaatatttttagtgaaacaaaaaatgaaacgaatttccttaatagagggttttcaaaaaatatgggttatttgttgcaatggagtatgtgatggagacacatggtaggtgggggcagagaacgtggtggggccaggcacctgcatcacgctcgtggtggccgggcgcgcggggggagggggttggtatttaatacggtcacaaataaaatccgcaagcgtacggatataccgatgtagcacttcccctacggagtatttcaagggtatcgaatccaagggaacgtgtgtgatcagatcttcctccgattcatccaaggacaccaagcaaaggatagaccaggatagagaggatttacaagtaagaaacagtgtctagggaaagcttaactttaatcctaacacaatacttcaggcactggcaacccgctgttctcagatgttgctctactacatatccggacagggaggacttaagtgatctcgagggctgtcaccacctctacacccacctcaaacgtactgtgggatacgtagcaattactggataataattacctaatcaccacgtttaagcaattaatatttaatttagtgtttataactcaccaaagcaatcactatattttagttgattatagcgaacaataattctgtatgctatttaggaactaaccaagagataattctcacaagataaatctaaattactcaagaagaatattatattgaattcagagtaataaacagaataaaagaaataggagaagattaccgacaactccggaattcttccgactccttctattctactctcttcctattctagtatacaatatagtacaataaagcctcttataattcagctcaagcttggaagtgtgtgtatgaaatgaggaagtgaagcctttatatagaggtaggtatgatggttggcgaaggggaaatgtccgaagtgccctccaaccgtcatcagggatgcatctgggacgtccacgccaaaccccacatccaacggtggaagtggtggttcggccgaaccaggcccatctggcctggccttcggtcggtagactccctagaccttcctccatccatttctcggagttttgggttgaattacggatgtttcgatgaagttcacaacccctccttgtatggatacataattttcctcactttagtccgatttgcctcccaacttcagggtttatcatctgcatacaactatacaccaacacttgtggaatatgtgagattaagcacctatcactatgttggatgttttattatctaaactttatgcatatgttggcagtatagaatcggtcatttaacatccgccaacagggggagcgcccgatctgcttcacccccgccaggcgcccggtaggcatcatttccgcaattataattagggaatctattatattattaaaacagctttaaaaggaggcaccacgttcaccgtgggggctagaaattctcacattaatcggagaaaaagaaaaggagagtccaagtagaaatacaatttaaaaatagctgaaatttagaattaaaaataagaaatattgaaagaagagttcatataagaatccaatacgagattaatcaaaattatgaataaaaataaaataaaatccgaaattagaaaataaaaggagagtccaagtaggaatataatttaaaaataattgaaattcagaattaaaaataaggaatattgacagaagcgtccatataagaacccaatacgagattagttaatattcggaataaaaataaaaataaaatccaaaattagcaaaaataaaataagagttcaagtaggaatacaatttaaaatcaactaaaattcggaattaaaaataagcaatattgaaagaagaatccatataagaacccaatacgatattaattaaaatttagaataaaataatataataatatccaaatttagaaaaattaaaagagagcacaagtagattttgaaacaactgaaattcaaaaaaaaaattgaaagaacaatatacggtattaattaaattttgaaaaaaaatataaattctgaaataaaaaaaattcaattaggaatacaatttataaataacaaaaattgatgataaaaaataaagactattgaaaaaaagaccatctaaaacacatgacgagataaattaagtaacaaatctataaaagattagagtgctggcggttgatacgatatataataactgttagtaaaacaccagatagaatcctaatgatgattaaaaggagggacgacaggcatgccgtgaagcaaacgggaaagacggttgtcgtgacttctagaaagtaagaaaaataaaccccattgataatcatattcgattttaaaatctcaatgacaataaaaagaagcaacgtgcagggtgtataggagtacagttgcagagccactggcggttggcgagacttttagaaaataaaaaaatgaattccaatgatggttatgttcaatttttagaatcccaatgacaataaagaataggcggcggatgagccgtagaggagtacagtagtatcgtttgacgagacttctaaagattatataaaaaaaccattgagacaataaactctaaaaactattttaaaggttcagaacttctaagaagtaaaaaaaaacaatgataattatgttcgattttaaaatctcaatgacgataaagaagggaggcagcgggcgagccaaggagtacaatagaaaagtcgctgacggtttggcgggacttatagaaagtaaaaaatgaactcgaacgataattattttcgatttgtaaaatctcaatgacaataaagagaaaaagacagtggacggatcgtagaggagtataatggccgcgtttggtgggacttctagaaattataaaaacgaaattcaacaagataataaactcaaaaaactataagatccaatttttaaaggtttcaaggagaatgaatagaaataatggtagaccgagcaagcaaataaaaaaaaggagtaaattgcatttagggccaccttttattaccaatgtttcactttggaccacccttttaatacattttttcattttgagctaggttactttacttttcttttactttggaccacccgcataaactttttatgaatacataaaagactttttcaactttaaacacatcagcaacccgtaacccgataatcttttccaacttacgcatgtaattctttacaatattatagagtaaatacagctaaagaaaatgacttggggtggtcaaggtaatcttacctggtccaaagtgaaaatatgagctagaggatagcccaaagtgaaactttggtaataaaaggtggaccaaagtgcaattaacttaaaaaaagatatgacagaagtaaggggtagcagctggtatgactttatataattagaaatacggagatagctatttaataaattttaagtaaaatcatactaaaaaatatatgattttgtttgggtgctagccgcgcaattgcgcaggccacccagctagtttcattaaccatagtctagatcagaagatcggcaccttttttttcatccgattcttcaatttcttcagtgctaagcataaacccataacacctcaaatctcataaatccttgcctaacattacgtgagagcatgagcgaaagacaacagcaactgaatctaatctctaatctaggtagaattaggcacggaggatgcaagcaattgcggttcgtgccacggtgaccgcctcgatcgacggtctatcagggcatcacaatgtgagacactcctagaatatcctcactaactgaggacatcgtagaaaaactcagctcgcagtgtagggtatccttggatggactcctcaagatctaaagcaacctggtagagatactcctgtacacaatgagtgtcctagcccacaaagtccccactcatatttttactttcctacccctcttctctttttcttcgccaccatgccctcttctctttttcttcgccaccgcgtgcctctccctctcgccccctctcgccaccgcgcccctctctctccctctcgccgccgcgccgtgcgcgtctccctctcgccgccgcgccgtgcgcatctccctctcgccgccgcgccactctctctctccccctcgccgccgcctctcttactcgccgccgccgccggccggagggggcagatccggcgccatcgtgggcggatctagccccccgtggccagatccgccaggagaccgtggcggggccggcggtggcggtggaggaagccgaggtgcatgtggggtcgtcgccaggtcatcgtcaccgtctccgtcgcggaagccgagcccgtcgccagctggtggccggcggctgccgcggcgcgaggaagccgtcttcgcccgtcgctggctggtggccgacggctaccgcggcggtggccggatctggtcgtcgccgtcgcggatcctcgtcgccgtcgcatctctcctttctctcactctctcgttgccatgccgccggtgagggcaaaaaggggaaacactgggggaggagacaggggacggggcaccgggtcgctgcaatgcgtagtctcgagggagtgtctccggaaaaagggagctgaggagctagaggcacgcattccccacgtgggggtctcgcctctctccagggacacgcgcagcggacggacggcgaacggcgtgagcggggagacgacccaggggtacccattgtggatggcctcagtatcaagcgcggagcagcctccggccgacctcgaaggagacgtaggcgtcgatgcagtgtaccagatctactcgttggagaggcagaaggcgtcccagcggctcatggtcaccctctgcagcttgacgaggtgggcgcccatgatgacgtgcaccacggcctgtaggccggcctgtatgagctccgggcagcccagcctctgcgccgcgagggtgcgaaggtcggcggtgttccccgcggggaggctgtggtcgtcgctcagccgctcggcgtccttgtccacgctgacaccgacgaagcagtccgcggcgccggcgaggaagcggcggagggagcccgggatgtagtcggcgtggaggaacgggaagatgaggcacctgcggtcgacccagagctgcagcagcgcgacagggttctgcgcgacggtggtggactggtggcggcgcggccgccgtggcaggggcacgggcggggcgaggtgatctcgatggacctcggcggctctccctctctcttacttttctgaggtcggggcgcagggggagagggatgtgggcacgggtgatgacgccgaactggctgaggatgacgaagaagaggtcggggtcggcgggggaatgtcatcgaatcccaatccgggaaggagaggaagagccgagaggagaggaaatgactcgtggggcccacgttgtccccaccatatttatttttttttgtcgctaacacatgggtcccaccattttttaagctggcatgtgggtccatgatttttattatttttccaagatataattgccacgtaaccgccacgtcaatgctacgtgggaaaaaaaaaccagtcaaactagccacatagacgtcacgtcagccaaaaccaccttttaaaccgccgagggaccttatttgcccccgatttgacattttagggaccggttgtatctggttttgagattgttcaaggacgcgaaaatctgattaggtgtaaaattaaaggaccttagatgaacttattctcggagtaatgcatctcagatcgttggagcatggctagtttggtaacaaggcctccatcttccttacacggatcgtatctgctgcgccatatttttgggaattgctacacatcaccttatttttattttttcttaaattttcttttgttgaatgtaatggcacctatactcccaccgtccaacagaaaaaaaaactcaacctaggaggagaggtgtccaaattcattatcgggatcacctatacatttgtcgataaatttttattttaaaattttgatagatgtaatcccagtacaaccgtagtataattacactgtaatttgcatttaactacaatataattgtacattgtatgtaacttttatataattttaaaccgttagatttgcttcaagatttgtgcaagtgagaaaggaaaaaagtcgcagcacgcgcacacatgtaagaggattcgttcccatgacctccgtttcaacgaaatatcatgttatgaagagaattttgaaagttacatgcaaattacactgtactccctccgttccaaaaagagccaaccttcccctcctagtataacgaatctggttcctctaggttggtttttttggacgctcggaagtatatgcaagttacaatgtatgtaattatatttgctaaattttaggagaaaatttatcaacagatgtatatcaaaattgaaatatcagggtgaggctatagccgagggaggcaaaatggacctacacagatttggtggatccgtgtgagaaaaatggtcgacggtccagttcactgtttccatccccggatagggtcccacgcggcgcggccacaccacggcggccgtcgggtcccacacggccggcgcgatcgctcgccgcggctcgtggggacgggccgtcaatggcgcctgcattcgcgcctccaaccccccccccccaccccaacccacgcgcgtgccaacgatcctctgcctcctcgccgccggcttccaccggtggctccgcgtggagcccgccaccacgggcggggccgctctgctctccgaccggcgccgtcgccaggtgacctaccaccatctcctcgtctctttctcgcacgcactgtaggggcgagttttgcacttgggccctcgcaaaattgcaggtattctggcggggcaccccgcaccctacgcctttcttgtttgtttgtttgtttgtttgtgagtgaagtgctctcgtctaattttgagattttggagttattttttttcttcaaagtgactgatgcagaattagatgtattagagttctggggattatggacacatttttagttaggctggctagatcaccgctggatatgttttggatgacgagaatcgcagtatctactattgctttagtacacgtctcaagaagtcaacagtaaaatccaatagtcttgctgctgttcatttattgactcatggtatttcagaacttaagttgaaaaagttttactgattactagttaggcattactccctccatcccattttgatcatcacctaagcaaagggagcatagatcaaggacaataaaacattcatcattctgtaattgattctcatcggttaaggtgctacgtttttttgtgttccatggattacatcaagttttaaatattgcatgtagttggaccaacagaaattaatcttggtgggttgcacgtagtgcattaagtgatgctcatttagtcttgacacaaataaacaagtgatgatcaaattgggataaagagagtacaagatacaccttgatagtccttgaaatatgaagtagttgcatcggactacaccaattacgatacaatagagcacaaacaccaagaggaacaatatactcctattattgtgtagcacaagtcgtcaagtctagggaagtaatgaatcagggctgttattaacatgctcattttcttcctattaaaagagatgaatggatgtacaatttcaggttaaaaatccttgcagtagaaacctacacaactgctttcggccacatgctttcatgattttttgcatgactgcatgcattaaggctgccttgcttatttgtcatacaatatcaggcatttacatcatgtcagtaactattaaacaaattgaagtgtcaaaatgtcattcctcttcatatcttcagttctgaatcttgatgtgcatccattacttatgccagagttctaacttgtccagttaggttgttatggcgttttcttctctacatctcaagaaggaatagatggtcgccatcgcggataacactgacatcatctatttcagcataatctctactgaccacctttctaggatgaaaaccttgaaacttctgacctgccatgcgaagaatatatatgatgagagtaaatacatactaccgtagctgatatacagtaaattgcagatttacatctgctatccactcagtaaattgcataggcgaaacacagttaaaataggtagtttaaaacttaattttacttactgccaattttgaacagttcctccaatgatgtaggcagcttgataagctttccattttgcgcagcagagactgttgagttatgacgatatttgtgaattgtaactcttttgtttgcttcttttatgtagtactcatctggaattcttcttgttatgttttcttctgttttatgtggagaccctgtctgcactgttgcattcattgttcgctgactgtatgtggagctgctatcttcagagtttatctggatacagtgctcttccgttctttttttgatctcacagtttgtgtgaacttcatcatggttctcttctttatctgtcatactgctattttcgttttctgatgccgaagatcgggttgcttctccaagtaactgtctggaatatctgtcacctccaaatactggagtgttgttactagaatccctacttgtgtgctctgtgtaatgtagttgtgactttttcagcagccatgcttctcgaggaacgtggaatagctcatacttgctcaagaatcttcggtctggttgattcatgtcaggtaaactttctcgtagcttcagcttctgtacattggaatagagttgttaacttctgattagctgtaaaaaatgcagtataattgtttgaaaataaaattgaagttatacctgaactaggttgttcattagaatgttactgtcttccctgttttcttcaatgatctctctaagccttgttttgcttattcttaaaagctgtgatagctccgctgtgcggcaagtaaatggctggggtatgttacataaagaaccaacctctccaaacatttctccctctgcaattttctcatatacctgttttcaaacaattcataatttttggtaaatctgaataaatcttactgatatctggaatagatatatacagagaaaacctgtacctgctcattcccatgtattgttgttattatattctacatagaaaaagcattaagaaaagcgcaattagcgtacagataaagccttagtgaaatttcatgtctgaactaaattggagatagaatactaaccactgctcctgaaactactatgtaaacatctgcttctccttcattctgcaatattatatcttcctttggtgggaagtactcagcctgcacttccatgacctgttttgttcaacatattcaattagtaaagactggaaagtattgcttttgtatggtactacgaaaatattgaattatttcatgattttaccagttctgcaatgaaattgccagatactccattgaagagataggcttgccggatgatcggaaagaataagctgtatgctatgcttgagcggattccttttggtagacagtctaacatgacctgctggttgagtccctctgtcttgaattgtaggcagaagtgagatagcacttgctgctttatgttctcaggtagctgattgcgtgctgcaaactctgatgctgcttggattgagtccctctgcacatatattttttaaaggatcatcaatatagcagtacatatattggaacaacaatgctggtagtagtaaccgttttagttaaaatgatgactatgctatttgcattcacttcagacctcttttagtattcttgcccttgagttgaatgatattttgttgatgttgttgtcccttagaatggtcaaatgacgtagggatacaagaacttgtaccttgtggaatactacaagaacaggattctattcatttattcccttgctttgctctatggttgaaaacccgcctctgccatttgcacaagaacttaaaagaatggtccagcatgaccatttttttttgtaaatgaaactataatagttcttatacccattggatattatgaatgtatggtgcttagttcttagggtgttgatcccctggatgtcttagatataactaattcctatgacacaattcatataaattgtataactgtgtagatgctcttgaataagcatgattttatatgtaaccatacatcccaccacgcataaaaccaaaatgctagtttgttctcagatctttgacatcatttatttgtatggcatccatatgcagcttatttgtatttttatgatcaaagggtagtgtatcacatctgtaatggcattccaaatgctaaaattttcacttgtctgccataatctgctgcattcagcactatataaatctcactaaaaactacatttctgaatgatctttctgtagacagaagatttgccattgacatttttgctggtaagtagagaaacttacaaatttcctggtgcggctggtcccatggacaactaggttggtcatgttgccaatgagataagctgtcaagcccagattaaacatcatatagacaatatcaaatagcatctctgttggattttcagcatgtaggtccccatatcctgttgttgtcagtgttgtaatggaccagtaaagagcagtaatatatctagtccataagctctctgatctgaaagttgacatcacagctcctatccatgttttctctgggttgggatatctgtcagcaatcatataattgaagcatcctgcacaatgtactgcgaagagggtcacctgcattttggtcaatacatattttatacacataagaaccagcttatttcttcctataggcacataactagtactttgcaagatagaaaaatttttgcacagaacacagaaggtaagtttcttttgttcagaaggacttacagaaataagttttgagcacctagtccagaaatagttgaatcggatgtctttctccagcctgataaaatagaatgattaaattgttgcagttgtcacttgtgattcgccatcaaattatggagaacctggacaagattttgaacctggcaaatagtgaactgactcggtgaagacgccacagcctgagcaaattgagtaccttgaaagcaatgtcattccccttgtgtgtaaatagaaggatgattggttgaaatggtgctgttgaacatacatcaaagataaaccaagtggataggtacctgcagatgatcgtagtttgctaatgtcagggcagaatcgtttgggcctttttcaattccaaatgtggggtttctaacatgaaagtatcataggaatgagtaacgcaggaacacacctcattgcaattctctttcggtcatccacaagaagatgtgttttgctatcgacataagcaacgaagaacgtcaaaacaatatcaatggcaaagaatatatccacaatgttctcaactagcaaaagcttagatggtaagtccctcaggaatgctagttcaaacggacaaatccaggcagagtaaacaactaggactataaggaacagctcccaggatctgagagacacacagacaaagcaaacaaagatcatgtcagcaactgctgtttacttatatgccttgcagcatgtgataggtacagaaagtgcagtgtgaacctcacctgtaccggggatcataaggcgatatgatgaacttctgcaacttgttggagtggtttatagttgcaccaagggatggcagtagctctacagtgaagctatcgctgctcctcttgatctggagtccatcccagaactggtggaagcaagattttgagtgagcttgggtcatggttgctttgctgttcttgttcttggccacccaactctgtttgcagagggtgtggaggctgggtctttatatatatatatatatgtatgctgcacatgatgaacatgcagggtcaaggtgaggaattttaaaaagaagggaaccggaaactgctcgtgtcctgtaccttacgaggaaaacaacggacagggcatgcgtgttttagatgggagatgtgggaagctgttagctaagacaagtcggcagattctatcacgagacagagttgacttcttttggtagatgatcagctgcagtcaaattaactcctgaagcaatttatttccagctgatctgcaaggatagattctcttgcgaatgccttctgttgagcaagaaccaacaggctcctctccaaccatttgctctggtgaatgtgcaggctccttctgtggactggtgctctcctcgattcaaccaagaacagtctgtggtgtgtattgttttgctggtgtgttgtgcatccagtccttgtgctgaagtggcaattgtgactagtaattaatttctggatagctatgcttcttcataattgttacttttgtagtagccattggttcccaagtcaaaggttaaaaaaagaactcgtgcatcagtaagtggcattctgttaatctcagtcaaatttacttctgacatatgtttttcttagcactgccatccacatgtttgtgcaaatgtgaacaggacggccggaatcatggatgtcatttctgccagtaatctgcaatggacttaatcgttgggtatattcttttggtagttgtgttcaactaagatttgttttagtgggggtgaaggatccattctctacgttcatctcaactaattaaagcagatgaatggctaataagatcatccacaatctcttgtcagtcactcagtctaagtagcctccgtgttctgatgcctaccagttgctgcaattagtgtttatccggtgcactgattgggctgcctgttttcatgggaccagtgaggaatgaacagactgtatctccattattgtgatctctggcaaaagtttcacttgtttacaatcttatttgaagttctgtcttgtatcgcgttcttggtgaatcagccagtacttggtcagatggtacccacttcatatcttgtgctttgcaatggaccccgaagttatattctagacaaaggaaaaaaccttcttcttggtacactaattgttgggcttgtcgatgttataactgaataataagcgtatgatttacttttgtaatgattttgctggctggatatagcacttgctaattgctatcctgacagatgctcacatgtcatgcagggtactatggcatactggctgacaacaataagtggtgcctactttgatgttaggatgtgctgctggggatacttttttcgtacatcttctgtaattttctggtattgatgtcaaagtcattgacaatcatatactggttaaatcttttccttgaaggtaaactatacatttttttaaattgtaaaataacgtccaatgttactcattttctattttaaaaacctttccagaaaaaaggaactatgttgaacttgtctataatttagcaatgataaatgcattagttatccattgttgcctagccatcattatgccattgcacgtgtttgaaggacacgaggaaatagaaatttcagggctatttgtgtattagtactatctttgtgggcctggccaaaagctaaaccatacgagtccctatctggtatgctcttcaatatactttcagaggcagaattccatacaggtgactactggtccatcctctacctgggatgtcaaccttttttctattaaatatgcattttttttgttgattcgtttgcatcttctgtaatttcgattcttatcaactacattgagtttatcccattaagatggaataattatcttttgatatcaacgaatttctactgctttttgaagggccttgttcagcactgctcctagattttttattctaatttttgaaaaaagaatataatactaaaaatatagtccaggtgaagcagactaacggtttgatggttttacaatatcaactagcttggaggggatgtattacaaacacacttttgtgctaatatcttttatacagtacttttaatagattgttctatgaaaagctggtgctttacaggaccattaaaacaatctgacaaccagaattttcagccacttccttgtgtttcttgtgttcctgatatcttgcttctgttgggatgtcgtctgcattatcacaggtgatcatgtgagagtggtgaacgatgaagtggcggtccttgcaggcatgtgcatgcatgtgtccattcccattttcttgttgcatctttcaactgtggatgatggtgttcttacttattaggagatgtggcgatggtgttcgtctttataatgatgagctggttgaaacgttgttgcaattatgttcaaacaacacaggggaaggtctcacatgggtagtaccattaatacatagaccatgctgattgcaacgtctcaaaaattatgtgtgaagttcaaatctaatttaatctgcttatcaattgaatgccatatttagctgttgctgaaggctaataatgttacagccacttgtgaaattttttatgttgagggttaacttcctattctatagaccatggtcagttcagatctttaaatcgtcagtgatatggttccatcctgattagtcattttcagtaacatcttcttttctctttatattctgtacttttgattggtcttatctaattctattccttgttgttatctggcttatatgatctgctctttgagcactcctgttcccatatcagcattttggaatcatttgtttgcgtacacggccataccttttgcatgccctttttggtatcatggttctgtttgtgaacttgatgacagcgtggttgatacgcttttgcctttcacagttacaatgataatttgttataattttagcttatactattttatctgataataaaattggtcaataagttgcttgtttttcatggctgacaaggtgtgtcaaaatttggacacagatatttgcaacaaggatattaccgtgcacatgattatgggtgtgatcgatatatctttagtctttgtcgaatttattgatttttacttggattcacgaaaataacatgttgaatgtgcacgccatggttgattactaacttactgccttctatttgtattggtccctttcagagtacaatttccacaaacagatgaagcagaatttgtgaaaggtgatagtgctgtcgacaacgaaatgattccaggggtgatttagaatctttgccagaccttatgaatgaagatttgggatatgatatgagaggtaaggaattgtttcttttttttttaaaaaaaaaggaggaattgtttgtttttaaagtgaaaaattccttaattgcgtgtcaatatttccttcatatcttgtgattgcttatcttagaggattatatggaaataatttagtgttcttatatgaaccagaaagagaaaatgattccaggaatttaccagattgagcatacctgaacctctgcaaattatagataatcacagtccaaataatttggccatgcagattaatggagcctctcctctctaagtgagctgtcaattaaatcaatgatcatgataaggttccaacaacgaattcttgatcatccagccacttgatcctttggtcattacatgttagtacctctggtagacccccattgaacaattcatgccacaccctgattaatcattgacagcgttgtctattctctctcggtctctccgtccacaaatataagggcttctagagagattaaaaatgaagcgaaaagactatgatgcctatggttaaataaggggtgattggtgttgaatagtcttatattggttgtgaaagggcaatggacctaatatataagtaggggagctcctcacctcaacggctagcttttgagatgggaaaggccctttataatactacaattgggataaaactgcgcaaacagttactgaggggtggttggagggggaagtagttcttcggaaatgcttatatttatggataaaattttaaatgctagaagttcttatattcgtggacgggtatttaactctattcttgtatgtaaacctcacacatcactgtgacttgcaggtcctcacatccggccgtgcagttacaaacttgagaatgaaaaaataataaaacaaatttaaatttgtaatgatattggccgtttaccaccggttgccgataattctgaccaaaccggtctggtcccaactcccagcacatatgagccactcactgctgcatgcggtgcgatgcgcacctagctagctagctaagccaatgttagtttcacatcactgatgatgacgatgtagctagatcaagtctgaacccagctatgagctatccatccagggggatgaggtagaagtagtagtagtagtagtagtagactagtagtacgtcgctgctgcacctgcaccggcagtggccaccggccgggtgtgcaaatgcaaattacatgcaatattgcataggcagaggctccagaaaacgaccccagtggtggtcggcctcctccccgttcctctcgggagattagtagtaggttcgcccagagggcagcgtccatgcagcttcgacaaatggccgtcgatgctgccacggccgctgtgccgaccgacagatcaacttcgtgttgcatgcgcgtttgtgtagttgtgtactccctccgttctaatacaacgaatctggatagagatgtctagattcgtagtactggatgtgacttttcgggacggagggagtacctctgcagcttgcccgcttaattacatttgtgcgcatgtccttttctgtgtgtttatcggattattgaaacggataattttgctccatgtttcgagaaatatgttttctcagacaactttctttcgctgaattgcttatacgttctgagttattagttagttttctttgttaaaatattttaactattcttgtgatcaataatcaaatagataaattcgcgtcaataatctaaatcaaacaaagccataatttgaattttgagatttaatttcaaattagtctatgtattataagccatagtttgaatttcgagatttaattttaattagtttaggtgttttcttttcacctgttttaatgttattttctgttgctttagtcgtgtgttacccaagacaaattcccagccaagtgatttttaaatgatgtgatttttgcaaaaaaaaaaaaacgatgtatgttttctgagagaaatattctaaatcaaattttaaaatagttaattcatttgtttgcacacttaaataattatcggaaatcatctggctattcagccatggcatatgctgctctaaagattttttttttctcctctttagtcacgaaagccacgaggagaaagaatcgagttcggcacggagcaggagcagcagcatgcagcggcactgcagggcggcgccagctcgatcttcacgttacatgatcagtcgatctcaaatgtgtgacaatgagccaatgatgatgatgagcagctgtagtttgttttacgccatagtggtagtttaagttgagtttggactttggaagatcgatcagtgcaaggataagatggatcgatgccttttgagttctctagaggtgtgtaagggtactattcggttcttgttcttcatgggggggacttactggagcacaagagagtttggcagatgatcaagcccctggagccactagataattgaccaattaaaatactcacgaaagaactttttaaaggtggaatttgtacttagttatcacctagggcccaaggcaatgcatgcgtctttctttcttgtactacagacgattggcaccggtgattaaaaaaaacactgttttccagattttttttttacttttttatgggactagaaaaaatactcgtgcattgcaacgggtgaagattattttaatcttattattgttatacggtttagctaaggtgaacttaactgtgtgaatttgcttggacatatttttcttttagaaaatcatgagctgcaattattagtccgatttgcatcttaaattagtatacgagtttttttaaagagatttcttatacgactccttttatatttctaaaagcaagcgaacttaaaatttgacttaaacacaaatatgtatttccaaaagagaacgaacttaaaaccgactcaaacaatgatgatgtataaatataccggcaaaaatatcttcaatttttataatagtagagaagagatatacaagccagaagcaaataaaaagtactttagtgtatctctacaattataaaaattaaagatgtttttgccggtactttggtaggtcattcgtgtttgagtcggtttttaagtttcattcgcatttgaaaatacatatccatgtttgactccgtttttaagttggtccgcttttgaaaatacaaaaggagttgtatagaaatctctttaaaataaactcgcatgctaacttaagacgattagactcctagctgcaactcatgattttctaagaaaatatatattcaagcgaatcccatagtaaatttcactttaactaaacctataacaataacaaaatttaaatagttttcacccgttgcaacggatgggcattttttctagtgtaataaaaagcgagggaataaagtggaggattaatgcattggagtttgttagagtgggagataattgcattggggtttgttaaattggatgttattttgatctctcttttttttgtctttgtattggtttgtgtgagatgagtgcaaaataaaattattttctgatggaaacacaacttaaaaaacagaaagcatgaaaaaaaaccctttaaattaaattctaaaattaagcaccatcccctctccggtcattaagaaaagagtaaatttcataaaactacatatactttgcatgatctatcacaatactacagatttaagaacttatttcacaaaactacaaatttaatgtcttcgtttatcacaaaactacaggtattttacacaatatatcacaaaactacagatttaagaacttgtttcacaaaactacagatttaatatcttcatttatcataaaactataggtttaatgtcttcattatcacaaaactacaggttttagcattgtcaaaacctgtagttttgtgataatggagacactaaatttgtagttttgtgataaatgaagacactcaatgtgtagttctatgataaacgaatacactaattctatagttttgtgaaacaagttcttaaatctgtagttttatgatagattgtacaaagtacctgtagttttgtgataaacgggcatactaaatctgtagttttgtgaaacaagctcttaaatctgtagttttgtgataaattgtgcaaaatacatgtagttttgtgaaatttactcttaagaaaaatgctgaatgcatgaagtattgaagtcagtggtcacctttcgttttcgaagtgaaaatcgctcctcactgatttactaaaaactggtaaaaccaattgactttcggtcaatgctgtacagaaaccaccaaatactgactgatttttataagccgagacctagaggtttcacgaaaactgatcgatttcgtgaaccatgcatggagctgaagatgctattgtttatgatattttttagggttaattggacccatgtcattacaaatttgccatttaagaaaaatgttgttacagttcatctatttgtagccatgtcactggaattttacaaaattaggaccatgtcactgccgtcacgttttccatccatatcttttttttttcctgtcttcttccttctttctcccgtctcttgagctcgaacatggctgtacggcgagaccaagatgaccatggtggagccaaggaggaagaggaagccattcacggcgtggcagcgacgctaggcaaaccaagtagctacgtgccgcggtgctgggtgccagcgagggctcatgttcggcacttcggcaccgtgcgcctcgccgacgcgcgtgtcgtcctcctgtctaggccggtctacgatgggatcgacagcgaccagatctaagctgcgtcggataccagcgatgggaacgacaatgacgacgaccagatcgacccgagctccttccgccttgctctctcaccgacgaggtcaccgccgcttgtctccacctccttcgcattgtccctgcccaagtcggtgactttgattgcgccgcgtgcctcgccttcctcctgtccaggcgggccagcaacgggatcaacggtgaccagatctgagccgtgctggatgccttcgacggcgaccagatcgatccgagctccttccaccacactctctcgccgatgaggccaccgccatcttgtctccacctcctccgcgtcgtccccgcccaagtcggtgactctgaccgcgccgcgcgccttgccgtcctcctatctaggaaggccagcgacgggatcgacaacgaccaggtaatgagctgcactggatgccagcgacagcgaccagatcgacccaagctccttccgcctcgctctctaactgacgaggtcaccgccacatgtcttgacctcctccttcatgccgtccctgcccaagtcaacaactttgacccctcattggcgtggctgatgacgcccagtgctgctgcttcgagacgcattggcgtcagcggtgcggcggctgtgggagaacgaggttgagctcgacgccacccgttgccgcgcggccgagctggaggagcggctccattagtggctaggccgtggtcggagggttagtggccatggcgaccaccttggccttcgccgtgccgggcaaagaaagcagagtgagaggatacgggagaaagaaggaagaagacaaaaaaaaaagagatggatggagaacgtgacggcagtggtatggttctaattttgtaaaattccagtagcacagctacgtatagacaaattgtagtgatatttttctgaatagataaatttgcaatggcatggatccaattaaccctactttttaatctagaatgtatagcttggagctttgaatgtgtgaagaatgataggtgcatgtttgtcataaaaaaatctcataaacttgtaaaatttttctaggtgtatgattctacaatatagaggcgaaaattgcctctatgggataaaagtgtcttttgtgaccaggtgacgtaattcctttctatctgtaccatttcaaaccagaaatttatattagcatacgaactcctaataatttattggtgtgaaataacgcaggttatattgatgaaattgctcatttgcatgcaaaaatgataatattggtaaaaataagtagcaacttgaacacttaaactatgcaaacaagcgctactagagaaacccctactatccctagtgcaaaataaactaggttgatacaattctggatttctggtcatatggtattcatctggtcctagctaagctatgtgcataattaggaaccacaaaaaatatgtatgaccatgataatatttatcatactatttctacctgattctaataaactcgtgcacttccttttaactagttttatctccttttttacattgtaattatacagataacaaatgatattccattggcatcacatttctgtaaataaaatctattaaattatatatatattagaaataaagttattaaagtatatataattaattttaaaaatttcagtgttacattgtgcatatacacaattgattctttgatatagaatagatcatacttttcaagatctcactgaaagagccgtcaacatattcagtttggttcctaaaaacttgcatacaaaccatagtctcttttgggactcattgtgcagcaatgttcttgcattgttttttagaccagtcctagaaaactagatgtacaaatcaatggaccccaaaatgagattgatagtgagcgtcgaattggcaatagttggctgagattgtgtggtcctcaaggtgtccatcaaagggaagtctcacactctcaccctttctttcaataaagaaagcaattaaccataacttccactagcaccaagagttagtttaagtgggagtgcaccgatattctcttgtcctccccacacaatcaaatttggaagagggggcaacacaatgcaattagctttttctaggaattatctcgagaaagtgggttggagtctaaggagagacctccacaagtatgtggggctgaggatccaataatatgcatccaagtgccaacattttatgagaagaacaagaagtggaagaggaaaacaaaaggagatcatatattcatatgctccttttgggttaggctcagattctcaaattggcggtcttgatattatgcaaaagtagtagtaccaatgtaggcaaagcgtgcacacaaatgggtcgcccaaatggttccattccatcaattgtggcaacatatatagttttataatcaatggccgttatgattcttctttcatgttttgtaggcacaaaatgaacagtggggaatttttgaaagaggaattagaaagaaggccatcaagaagaaattccttgtaaagagaggatgagagagggaatttgatggggaaacggaggaaaagaaggtgctgttttgactacttgctcttggtgttgtttgcaagcatggctgttggccagtccaaacccaatcatttgttctgcagagaagctcatcttggcctttgcatatgatgggctgaggaatcctcccaagttgcaagtttggagtctcttttttgtagcttgtggtacaccaagaagttctcctaagtctcctccacaaaaaaagggaaaaaaaggaactcataaaagataaattaccattgaaagagacccactttttgaaaacaaaaaaaaactcattaaaaaagaaacaaccatagcaagaggaagagaaacacagaggagtttacttttgcaaaatatatgcaactaacaaagtacatgggcctaccttgcaaaaaatgttctcggctagaagtctaatccaatataggccggcccatcttccaacacttgctttttcaatgttttcaactatttttccttttaagtttatagaaatacattattcttttttacaatcctagaggatatatctaatgaaatgacgtagagggttcggggcctagggacacgttagaaattttgcatataggccctttctgtccttctaatagacggttttcgagttaccgtctagatagagagcgggaaggacccaaataggattttaattttttttttacaggcgtacgtgattgtggcaaatgaagtcctatgggaaagacacagtttatcccactccctcgataattccatttaattccagcaaaaaccaggttctacacatatctgttcatgcaaacaatatgttaaactccaacccctccgcgctatgtcattggacctattcagtagagagattcataagccgctacagtagagtagcagaaattacactgcttgcagtgcagctatcaccgcagccggttgtagcatcctgctaacgaacaaacccattagagctgctctctcagaaggcggtttataaaaaagataacctcctaaagggtgggagaagtatattttcgtaaatttgtaaaagaaaaatatattactgtaatttttttaaaaaactctgtcttttatggacattgagccacaaaacaatacaattttgctatatatttgtcgataaattttctcctaaaaatttgacagatgtaatcacactataatcgtagtataattacatgctaacttgcatgtaattacactgtaatttacatacagcttacatataattcaatgtaactttcacataattttgaaccattatatttttttcaagatttgtacaagtgaagaaggaaaaaagtcactatgcgcacacagtgaaaggattcatccccacgacttccgtttcaccaaaatcatgttacggagagatatttgaaagttacatacaagtcacatgcaagttgcagtgtaattacttctcgattgtactataattacatctattgacaaatgtataggtgatcccaaacaaggaaaaagtacaccgaaggtccctcaacttgtcatcgggataaaaaacgtcctcgaaccgcaaaaccagatatgcggggtcccttaactatacaaaaccagtgacctgaggtcctttgagtggttttgacctcagttttagcctatgtggcgcgtgggacccacgtgggctccacatgtcagcgtgccacgtcaattcccctttcccctcttcttctctcccttcctccattctctctctctcgcactcttctcaggccggccgacgggtagggagcagacaaccgggcggcgagggggggttgagtggcgaacggcggaggcggcgtgtgagcgcgcggcggccagcgaagcggaggcgcggagctgcggtggccggcgagtggggagcggcgccgggacgtcgtcgacaggtgaggatcggcggggagaaggggtaccgggacgggcggcggccgatggggaggacaaccgacgagcaacggccgacggggagacggggcggcgtgcgtgccgacccgggctgccaaatatttgaagcaatggtacctgcggcagatgagatcggcaatcaaccattcaattcaccgcaccgaacactgttgtttccaccgacaaaactcgcatggcccggagatcactgatgcacagaaccgtggcttccctagcatgaatttccatgtaacttgggacaggatgattgttgttagcttgcttgacaccggagttggctgacggatgcccggtttcggtctggccatagctgttgcgctatcgaaatttcctactccatgaagtggctggtgtggcacatatgagtgactgcaggagaggaggacatggacggaggcaatcttggtggtggcgcagacggggcaagcatcaacggcggcctcgcaggtgccgcacaggcacaggcggcggcacgggagcaacggcacaaacgcctccgtgacacggcaggccttgcacgacgtcgccccggacaccgcgtcagcggcagtggcggcggcgccgccgcctggggtctcgaagcagcatgactgcgcgtcctcggcgtcgccctcccccgtggcggcggcgacggcatagggggactggaggagctagtcgagtgtggcgtggaggccggtggcaacggcctcgtggctcttggcaacgcccatccacgcctgcccctccgccctcatctggcggaccttctcctctagctccgcgttgcggcagcatgcgcgatccagcttggcctccgccgcacgcaccctccccgtcggggcgcgcgccgcggccgccaccagcgcccggacgtgccgtcgctgcgcttcctccagccccgcgcgcatccgctcggcttgcacggcatccaccaaacaccgacgccgatcaaacaccactcaccaaacacaaacagaggaggccggcggcgtgagcgggtgcgtggcctcgttgtaggtgaagaagagcgaggcgttggctgtcgggatgggaggcctgttccagcgtcgcctgtcgccagcctagagagaggaaaagtgagagagagaggacgaagggaaagagagagatggtgatgacgtggcacagtgatatgtggggcccacgtgggtcccacataggccaaaactggggtcataaccaccgaaggacctcgggtgaatggttttgtatagttaagggacaccgcatatctggttttgcggtttgagggcgtttttgagggaccttcggtgtactttttcccccaaacaataacatttgcttttctcagcccattttgcattttttgggttagattagctaggccaaattgagcccatctaggcccaaaatagtacccgatgtcagaactcagaacaaagggaaaagaaagccagcgaaagcccaaacggccaaaccacaccaactctagcattccgcaccacaccggaatccggcggcggcggcggcggaggggagcagaggcagcaccaccaatggcggcggcggcggcgtcgtcgtccaccccggcggccgtccgcgagatgcagcgcgacctcgagtcccaggccaacgccctcagcaagatccagaaaggcacgctcgaaacccccccttcccctccccttccttctcgtcacctcggaatcccgaaaccctaaccctagctctgtccgttccttccccctcgcagacatctccaagaaccaccaggtccgcaagcagtacaccatccaggtcggcgagaacgagctcgtcctcaaggcatgccctgctcgccgcgctctcttgcttccgctctatgtggatttttcctctttttttttggtgtgggtttctgattcgatctggtctcgcgcaggagctggagctggtgaatgacgaggcgaacgtgtacaagctgatcgggccggtgctggtcaagcaggatctcgcggaggcgaaggccaacgtcaagaagcgcatcgagtacatctccgctgagctgtgagtagccattgagatgatgttgtttggtgatctgattaacttgatctgtttttggggtgtatcgagttgtgctgatgctggggggttgattctttggcggcaggaagcggatggatcgagcgctcaaggacttggaggaaaagcagaacagcaagaaggaatcggtatgttcatcttcttgttattatttctggttttattggcaggtcagttaggaacatcaattcaaaggtgatacgcggactagcatagaagtaattgtttcttttttggtggcgattccctactggaattgtagatttcgcacgatcgtttaatgtctgtgacacataggccctggacctagacgggcatttaagacaacgtatgccaaataactgaattggtgaaatttcagtggttatgagagatttgtccttcctttttatgtaggaccatttaaaattgtggcctgaatttcggagtagacattactgttttcacaggctatatactctacaatctatttgattttctgatcaatatagataataaatacctgattttttacagatgaatatgatgtgcaatttctaaactatgcatagctactgcctgcccctagtttagttttaatgataggttgaattggacacgttgatggaaattgaaaataaagaaaaaaaaatacttgagatcccttgctgaagaagaaattacccctctgtttttgaataatttatactcttaaccaggacatgcatatatgcaattgtactttgaataaaaaatgacaaacaataccatattattatctcaagaactgatgacgaggtggaaaagtaggtgcatgcataggggtaaatcgtgataaattttttcgagaagtctggtgcaccaagtatttgaaaatggaggaactacaaagaaggtacttggcaaaaggattagaatgatatccatcaatgtttaaacttatatgccacattgttggtgagaatggttggttaaagagttgtgaaataaaataaatttggttgttcaagtattcaaacatggtgatgttctctttgactcttggcgtgaacttagggatacttgattatgtttcttataagcccatatttccttctcgctgggacttatttttgggctaatccaagtagctaggattattttgcagtcttgatccaccatacaactaccccaaatctttgccatagctttgatgcttgtaaaggtttttgtacttttgtgagatggaatagtaggtggtcttgtgctgaatcaactaggacacagagtcattcagtatgctatggcaaatagtatgctgagtcaaataggagaggcatactgaatgaaaaaggcagcagcttggaggtgaggaagctagtgctgaacccgtgccatggttggcttgcaagctggtcgtgactcttgacgcaactatctgaaatcttccttcctctcagggtctcccgtgcattcctctctctttatctgtttgattacgcagagagccttaaagtttgtagtttttttaaaaaatttcagtttgcatcctcatccattgatcaccacgattgggtatttcggttgttttcagcctataatacatcaacatgtgtgttgcccagaaagatagttccttattgaagacggggcggccccctagacgttcttttgtcttctttgcttggacatctactgtatgttctgtgctgaagttgtctggttctttggagtagacatctagaaactagacagtagagtacaaaccaaatacatcttatcaaactagctgaaactgctgcaatatgtgtgctcatacaggtttgcaatgtcttttcagtcttaggactgagattaaaaactgggatatatgtttttggaaagaatcttaatctgacttctctattttgagcatgacactgagatagtattggtgaaattgttttgctggtaggttcctgcattcttacatgatgccatactaaccgtaaaaggttcaattatcttggcacggttaacagattagtttagtttaattgctacaaatcttttctagaactattgacttggctgtactttgcacatcatcagagcatgacataggacaataatgacattgcatttagttgaaccctatgaaataggattattttgaagacctcactaaaaaatatatttgtttctgtagatcttcaagttgcaacagaagatgcaggctgtacaggcaaaggcataggccacacctgttttgctggttattttgccctccacttctccgtttggaattagcgtttctggtagaaaaaagaggggagaacagaaggaaagtgaaatgcatgtgctctgaaatttccaggttttcatgttatttggaactttttggatgtaaaagtttggcactccatacaagattattagtgaattattagcttgtggtggcttctgtccctggattagcttttcttgtttcttttccttttggggcgtcccagactcccagtattagcataattgatgtgataattgcatttttcctgccatctgagcttgtctgaactctcaattgaagggttctcgtaaagaaactatatcaagtctgctgcaggcctgccgtggcgagcaattctaacatgagatgagatgcattcccggcctatctggcctaattctttcgtctttggatgggctgaatcgtaggctaaaaatatgtcagccaattggaataagttcagtgtgattcccttatctagtgaccgaatttgattcgtatcctgaactacaataccgaatatctcgactcctcaactattaaaaccggtgcaacttgacttcctcagcggttttggagggtgatttcgttgacgttgtgcctacgtagcaatattgatttggtcttcatttcacgtgatgttgatatggtgcttatgtagtattagaattaaaaaaatgtatgtgtgatccatttatcatttacataaaaaaatattgtaggactcactgacatgtgaggccaacgtatcattctctctccttcccttcttcctcttcccttctctctttctctctcccctttctcttcgtttggagggggggggcgggagcaggagcataggcggtggcatttggccacgggctagggcgccgccggcggaggaggggcggagggctacgctgctgcgggagataaccaaggaccggctgggtctcctcatcgatggccttcgcttcaccgtcgttaccagggtcggcgatgatgcgcgctatggcgggctcgaggtcggcccggaagaggtttcccccctatgattagccccatgtcgagcgccctgagcgtggtggggcgatcagcggccacctcttgctgaagccgtgcgacgtggaggcaggcgagcgcatcgacgaccgatggtggctgacggtattctggtgaatggcggcggttctcgatgaacgaaagataccgaagcaaagagtggaggacgggagtcgtgtggacagcttggattaggagggaaaggacgggagaaggacagcgacgcctgttggaagcgtgtcatttaaatcgccgcctgcgaccaattggatggcggaaagggcgccgtccaactcaacccatcatcgtcgcgtcgcggccgccctgcatcccatcttccccacgctgcccaacgtcatcatggcgctgtcacccacgccaaatgctcattgtgccactgccacggccagcacatacatgccacaccgggagccacaccaccgcctctctcccgcaccgtgtagcactagcgctcacctataaaaaggccagcgagcttcgcttttcgccacactaccccatgctcgccttcccgctcccaaatcctcatccaccaccgcccccttctctctctctctctcttccctctccggctgccatcgccaccaatccaaattctcgcaccgtcgcaaggtagccacctcatccttccttatcctcttccctctctccacatgctgccgtcgccgctccagcgcccgtccgcctctccaacccccacctgccaccgccaccactaccgatctggcccctgctccccgcgcacgtcaaaggggaggagaaatacggaaagaaagagagagaagggaagaggaagaagggaaggagagagaatgacacgtgggccctaccacgtcagtgggttttataatatttttatgtgaatgagaaataggtcccacatgtattttttttaattttaatgccacataagagccatgtcaacatcacatgaaacgaagactaggtcaataccaccacgtaggcgcaacattagcgaaaccgcccttgaaaactgtcgagggagtcaagttgcatcggttttaatagttgggtggtcgagctatctggtattgtagttcagggatacaaataagatttgattactcaacgggagtctaagtgaacttattcccaaccaatttcgccagttcgtgtgggttggaccgacgaattctttgatgggaagtacgtggtgtgggttcatggaataagttcactttagatccttcattttgacaccgagtctaaaattcatcattgaactaaaatacgagatgcaatgcaaccttcaactctaaaaaccggtgcaaacttgatcctaagacagtttggatgacggtttcagctgacgtggtgtctacatgtttggtttgaccgggtcttctctccctccctcctctctttccctttcttcatcgttactggcatcggcgcacattagggttaggggagggatcacgggtggagagggtagcggggcgtgggtcgggtgggatgaggcggcgggtgtcagagggatgtggagtcaatcgtgaccatctaattattgtatatgtacgtgggacattggatttgatgaataagtaatataagtgtcagttgtatatgtacatgagaccccgctcagttggtgaactatatatggtagatagatagaatacaagaactagaatggttgtttacacaatgatcaccctcaaatgtctgattcattaatttcattcattcattcaacatgtagatgacaattgtcctcaaaacattttaacagaggattatggattaaaaacaaagctaaggaagaatttgtacatgtcgaggaatctccggcttctggagcttgtcggccaagacctccatgcccattctatgtagtaggagccagacgacagtgaggaactccccgccggcacccaagctcttggcgtgcaggaatcccctgcatctgctcgcggagtagcatatcatctccacccacaccccactgataaccttcaacatccttcctgcatcgttcatctgcatcatcgcttcggcaagcctacgtgcagctgcgagatggtctccaggttgtgcagcatttgggttttcagaaatccaacgtgcaactcccctctcatcgagccgctgcctctggtccctcaacgcgtgcttgatttcgcgacaggccacagcaaacaggctctgtcgggtgccgggcattagcatgtccggttggaacaagagcaggtacatcatgtagttggatatctcacgcgagcatttcacggcggcgcgctcatcggcggtagccggtggattttcgatgccattattgcaatcgaggtagatgtccgtggcgatgtgccagacaaggacggcctcgtcaaacggcagctcggtcacgctccatcccaactcttggtagcacctctctcgccggagagtccactggcctctccggtcattgaatctccggtaggcggcggcgttggttagatcatccacccatctagatttcaagtctttgccgatgaactctatgattatgggggttgacgaaagatgcccaagataccagtgctggttgacatactttttgcatctgaacaacgccgctatccgcatcaccaccatggttggccaccgtctacgagtggcgaagccgattaggttgaactgcgcaaccgtgcgctgcatctccggctggatccgcgacgtgacgaatcgccaatcggctagccacagcagggcgcagatctcgagcacgagcgtcgagcagagcaggacgtatgacaccacgacatcgctgccgtcaaacccgtccttgcgactgtcgttgaagcttgcaatggccgcgatgcccaggagcatggtgaagggtgcgaaggtagatgccgacgacggtgtacgcggcctctttcttggtgtagaagaactggaacgcctgatttagcagggcgcagagctcctcgtaggcgtcgtcgtcctcaagcgccaagaacgacctgaggtaggcaaggcggcgaggatagggtgcagggaagtcgacgaagagctccatgagcacatcttggagctcgggttcgatcagcggatggacatggaacacgtaattgtctttgggcctagggacatggtcaccagtagcctggctctgtacgtagccgcttgctaggtgtacatagctctctaacggaatatgatcatcgccggcgtcctcctcctcctccctcgccggcgtcctccggccggcggcggaggacctcacggcggctagcctggtaaagctggctcgccggagagcccacagccgctcgcctagcttgaggaacccagcggcgaacagcaacagcgccggggagctctccggcacctggccgccggaccatgacctccagaacacgtagacggccaccgccgcctcggacgacatggccacggcgtgccgcgcccacagctcgttgtcctcgatgttgtacgcggttatgctgtcctggccgccgaggtggacgaggaagacgggcacccacatcacctccagcacggagccatgatctgtgctggccgtttgcctgtgccggttgaagacggtggcgagggcgtagatcgccagcgcgtcgccgccgaggtaggccagccagatgcatgaccggaggagcgccgggacgcggtacttgcggaacgtggccgagacgaggaggaagagctggaggaagaggctggtgagagcgagcacgcggagctgccactcctcccaccattgcaccatcccggggaaggatggcgccgccaccgccatatcttcttcgatctcttcttcctcctctctggtcgacgctgttgttgctagctcgatcaaggttgcttcttaatcaattgtcttcaccttaactagcatggtggcccgtacagattgtgcggctagtatcattatattttctctcatataatagcacatatgttttctcattatattattcaaatatattaaaatgacaacatcattttaaattttgcaataactttacgaaaccactaatgtgtaatattcatattgtattttacatacgtgttagttattaattatttttaatattaaattttagttatctgtaaattatatatattcttcttatatggactttagactcgtcttttaatatttattgttttaatttctgaattttcattatttctaattgtatttctacgtggactctaaacttaatttcaaatttcagttacttctaaattgtattcctatattgactttaaactcttcttcccatgtttttcttaattttgaattttagttatttataaattatatttttatacggactctaagcactacttttaattttattatgtttattccgaattttagtatggactttatactctacttctaatattccttatttttttaattccgaatttctattttttttcttaattgtatttatatatggactctactctacttctaatattccttatttttaattccgaatttctattattttctaattgtatttctatatggactttatactctacttctaatattccttattttttaattccgaatttctattttttttcttaattgtatttctatatggacactatactctacttctaatattccttatttttaattacgaatttttattatttcctaattatatttttatatggactctatactcatcttctaatattccttatttttaattccgaatttcagctattttctaattatatttctatatgaactctagtctcctcttctaatattctttattttttaattccgaatttcagctatttctaaattgtatttttatatggactctgctttttctttttctccaattaatgtgagaatttctaggccatgagagcgaacgtagaggctcatttttctatttctttaataatataatagattagcttttctttccttcttgagatccagctgtgtgcattcatgctgtatatatatatatacggggtcgttgcctcgatcgttggtcacgtaagaaattgtattccggcctatcgatagaaacggtgggtacctaatgtttctcttactagttaactgctgtattgtcttgcatgtttttcttaattgtaatgtacagtatataatatgtaatcagttacgtcttcacattctcctttgagtccttgcatgtccaaagtatgtcatactcgtggagaataccataactggtggagaaatgctttttagtcccggttcgtaaccccctgtagtcccggttttttaaccgggactacgaatccgggactaaagatcgctatctttagtcccggtttaaataaccgggactaaagatgggagcatctttagtcccggttgataacaccaaccgggactaaagatattttttctttttttttctgcttttaatattgaatattgatttcacaccatcccctcccatatccaaatcatcacatattatagaacatctccaaatcctcaaacaaatcatctccaaatacattacaaactcttaaaaaaattacatcacagggttctaaaaaattcatcacagattcacatctcacacaaaaatacatcacagattcacatctaaaaaaaaaagaaaaaaaatccagccggcggccactgccgcctcccctcctcccctccacgccggccggccagcgccgcgccggttgccgccgagcggccgcccaccgcagccgccgcctccgcgcggcctcccgcgccgccgcgccggccgcccaccgccgccgccgcgtggccccccgcgctgccgcgccggccgccatgcaggccgcctccgcgccgtcccctgcgtcgccgcctccgcaccggccgcctgcactgtggtgaaggaaaaaaggaaggagaggaggggagttaaagataaggaaagagataagaagttagagaggaaaaaaagagatagagggaggagtttgttgtgtggacgggaaaagaggatcggtactatggattatatagtgtgttttgatttttattcccggttagtaacaccaaccgggactaaaaataggtttttagtcccggttggtgttactaaccgggaataaagatcatagggccctgacacaacctgacatggaatcaaccgggactaaagatcatctttagtcccggttggagttaccaaccgggactaaagatcttcctcttattaaccgggactaaaaatcatttttagtcccggtttttaatggaaccgggactattatggatatgggtcgaccgaccaaagatggtttctctaccagtgcatcgtcggagggagattaccgttggagaagaggctatatatcaactctatgatcggcctatcctaatccgattagtagaattagaatacactaatacacgaatagacatgagaccacgtcacatatgccaactatttccagccagagttgaaagtagcaacagttgttaaagtagcatttgaaagtagccacttttttcgtacgtgtttttactacatctttttaatctatctatctactatctacttaaaaaataagaggtgcttccatcgtccgtcaaaaaaaccgggtgaaaaaaaacgggcagaaaaaaccaagtttgtctgatcaaaaaaaccggacgaaaaaaaaagtctgatccaaaaaaaaagtgaaaaaaaaaaccgggcgaaaaaaacacccgtccctggcaaaaaaacacccgatcccttaaaaaggaaaaaaaagtccgagagacaaaccgtttaatgaataaaaaaagcgaaaaaaagagtccgattccctggagaaaaaaaatctgatttccctggaagagatccgatctgtattggattggagaaaagaaaaaaaacacttctctaggtgcttctgtcgtccgtcaaaaaacgggagaaaaaaaccgagcgaaaaaaaaagaaaagtccgataaaaaaacctggcgaaaaaaaaccgggcggaaaaaaaacaaatatgtccgacaaaaaaaaagggaaaaaaggaaaaaataccgaaacgaatccgactacattgacgcggtaaaaagagtttaaaaaaatgaaaagaaaactgtcctattccaaagaaaaatgaattatatgtatcgtggagcaaaaaaaaaaagaaaagtccgataaaaaaacctgggcggaaaaaaaccgggtggaaaaaaaacaaatctgtccgacaaaaaagaaagcaaaaaaaggaaaaaaatcgaaacgaatccgactacatcgacgcggtaaaaagagtttaaaaaaataaaaagaaaactgtcctattccaaagaaaaaggaattatatatatcgtggtaaaaaaatcgaccgggcgaaaaaagaaaaaaatagtccgatccgaaaaaaacaggagaaaaaaaatgggcgaaaaaaaaaatttgtccgataaaagaaaaggaaaaagctgaaaagaatctgactccatcgacgcggtaaaaaaaggcgaaaaaaaactttccgataaagaaaaaggaattatatgtgacgcggtaaaaaaaataaaaaaaccaggcgaaaaaaaagataaaagtccgataaaaaaacggggcgaaaaaaaaacaaatctgtcctatcaaaaaaagccaaaaaggggaaaaatcaaaacgaatccgactccgtcgacgtggtgaaaacagggcgaaaaaattccaaagtaaagggagaaaaaaatcaaaacgaatccgactccgtcgacgcggtaaaaaaagggcgaaaaaaatacaaagtaaaaggaattatatgtgacgcggtaaaaaaaatcgatcgggcgaaataaaccgggcaaaaaaaaaatctgtccgatccaaaaaaaggggaaaaaatcaaaacaattccgactccgttgacgcgataaaaaagggcgaaaaaattgtctgtttctaaagaaaaaggaattatacgtgatgcggtaaaaaaaatcgaatcctattatatctagaaaggtttgacactatgtgaaagtggtgaaaaaaacccttcgtaaaagaaatgcacgagaaaaaaattaaaaggacggaaaaaagcgcggaggaaaaaagtcaaatttatattcgtcgttttttagtccatttatatatcttctttatctctaatctaatctaatctaactataaaaagagaagtttctacagtatattaaaaaaggaataaatgcgcgagaaaataaaaacggtttaaaaaaacacgtgagggaaaaatgtcagaaaaaagcacaaaagaaaacgcgctagaaaataaagtttcgtagttctaattttctaattgttatctagaaaataaagtttcgtagttctaattttctaattgttatcgacatggttatgcatgaaaaacgtatattatcattacgttttttcacccgttgcaacgcacgggcatatttgctagtagactagaaaaatgcatgtgcgttgcaataggtgaagactattttaatcttattattattataggtttagttaaggtgaaattcattgtgttaaattcgcttggatatatattttgttagaaaaacatgtgctacaattagaagcccgatcatcttaagttagcatgcgagttttttaagagattatttatacgattccttatatattcccaaaaatgaagtaacttaaaaaccgactcaaatacggatttgtatttctaaaagtgaatgaacttaaaaaccgactcatacacggatgacgtaccaaaagtaccggcaaaaacatctttaatttttgctgtgttcaaataacgtttgctcctttggctgtgttcagacctccaggttaccaaccctctccctcattttccgtatgcacgcttttcaaactgctaaacggtgtgttttttttaaaaaaaatttctatacgaaagttgcttaaaaaaacatattgatccatttttttaaaaaaaattagctaatacttaattaatcacacgctaatagaccgtttcgttttctgtgcatactgttcctgctgggaacgagcaccagcgaacacagcctttgtcttattttaaaaattaacatatacttcctctatttcataatgtaagtcattctagcattgcacatattcatatagatgttaataaatctagacatatatatgaatataggtaatgctagaatgacttacattacgaaacggagggagtatatgctaaagtataagacaaacttaaagtttctttaatgataaaacatgccaaaaaaaataaatgatatttatataattttttttaaaaaatagatgaatggttaaacgttatcctaaaagtcaatggcaccgtttattaaaaaataatgactaatggagtatttatttactgtctccattcatatatttgatgttaggacgaacttttaaaactttagctatcaaaagtttctcaaatataatgcttactttaaaagtaaaaaaaatagtatgagtatatttgctttgaaaagcattgttgtatgtaatatcataaacttaattactagattctttataaacttactgtaatacaaaagtgattgtctaagttttaacttttgactaaatcttgttttacgtatcaaaatatttataaacagatgaagtaccgcatataacttattgccttgacaaataaaaactccatggacacccagaccaaccaccgtgtgggtggctacacgcccggagaaggcctgttgagagagtgtggctagagcgaaggtagtgcatgggagaggcatggtggtagggatcagtgattgcaattttggataccccctctcctcggcaagccactatctcgaccaaaaattttggtttttctcaattttttgtgaatttggtcaaattttagtttaattcaattaaattgtgttaaaatttcataaactttttgtccaaaaagtgccgaggatctcaaaattttgggaatatcagttttatcgaaaaggtcaaaattttcggtgaaatcgaaagtgaaaaccctcgtagagatgaaaggtgttggaggaggacacaagaatcggttaaattaaaacctgcccccaactgaagctcccacagcgatttggagtcgtgtgttcgatcgccgcgctatccacgtcgcccccgaacgcccaggtagcaagatttcgcgagcgagcgccgggttgtgggactgatcacttttcaaaaaacctcttgattttaccgataatttgttatagatccctagacgtacattcctcagccatgtattcttacgccccggccctctgaaatatgaaatatcttatgctaagaagagaaaattcggaaaacaggagtgcgctctgaaaagcgtaaagtgaggggtctttttgcgaaaccgaacatccctccaggctccacctcccccaaaccctagccgccactcgaccgctgttcccctcttgctctctctcttgccctcacggcggcgacggccggccggccatcgctcgcttttctccgccgttgacgaccactcccacgtgccctccactacactctgccatcgacaccccctccagatcatgccactccattgctgccccgactggcgccatggtggagatttgccgaagctccaccaccgtggttgcctccaagcaatcctctccgtccccttcctcctccgccggagcgtcccaaggtgagaccctcccacgcggatcagaaatgattcctccggcggtcactgtggcggagagctcgcgctggaaggagcagcaacatcagcagcaggcggtgccttgggcgaagctgctttcgcagtcctcacggcggtgcatgccttgagtgtccagcggtcaagacaagcagactagcagagcccacgctagcgtggccccgcgtggtggagcgaaggagccgcatgggcaggcgctggtcgttcctattagaagaaaccagatctggtccatggtaaggctaatctggacttccgtgcttgctccttctgctactatcttattaagcagctaagagagtacacatagctgatgaagcaacaacaatggcttagcattgagcagctggtggctctgctgcagtcacctcagagtaatctgtttatccatcgtttgttgaatcactatgttttccattattcaatttatgaattgcagttctttttacaataacaaaagttgtgagttaagcaatgtggtcttcagagttgagttttatctgttggtacttcgaaatgtatgtgtcaaagcaacttttaggctagatcaatcgatcaccactgcattctctttatacttcctaggctactgtttgtagcttctctgttgcagattatttctaatttcaatttacccattgaagtaaaataaaggatggaaatattgaatcatttgtttgcattactgctttttgtttaatcaatccatgcagcctaaattgcaacattcatttaatcattatcatctgagaattactaacagaagatggtcattatcttctgagaattactaacagaaggtggttgagacttgatcaatctgatgtttcatgtccaagtggcatataataacctagcaagttaatctggacaatgcaggttagatctgaaatcatttgctctacagtttcataatgcatatagttccttatggtataatatcagctaccaacctgccaatatgttctacaatctcataatgcatacaatgtctcacaatatcagctgatggatggcacagcctaacaatatgatggaaattgtgtggtcagaagcacaacacagaagctggagcaattttccttccacttctaccttgacagagaagttctgaagactgattttcattctctgattccaccagccactatgacagagcataccttgcttccacttttttccttgatgaggttgtagtgttcccttccccatatttttttgttgttcaacttaagattctcgccgttaaaaaattgcaaacaagaaatttggttccatttgatactgtgcatgtaatacaggaggtttcatttggtctattcctctaccatagatagaacaaagttgatgcaacggtttatgaaagatgatttccttttatgttcgctatttcacaatctgttctttctagggaaggtaatagatatgcttcacttctaattttagttagtcatggtaagctgggactctgatgcacaacatagaatatgtcaatctgagatattgtgctctatttctcatgtgatgctttttaccttcactgcagacaattagatatatggcagagcgagttctaggaaatgattcattcgggattgtcttccacgtaatgtgcttggtcttatggaaatgcatgcttagtgtgtattatacttcccccgtttcgaaatgtttgacaccgttgactttttagcacatgtttgaccgttcgtctattcaaaaagaattgtgaaatatgtaaaactatatgtgtacatgaaagtatatttaacaataaatcaaatgatatgaaaagaataaataattacttaaattttttgaataagacgaatggtcaaacacgtactaaaaagtcaacggtgtcaaacattttaaaacggagggagtacatttctttgatatgttctgaatcgaaatgatgtggttttgacatttacgctaagtgcttggagacaggaaaagagttgccatcaagaaggtgttgcaggatcaacgttacaaaaaccatgagctgcagcttatgcgcactccccaacggcatctctctgaagcactgcttcaattatactccctccgtattttaatgacgtcgtttactttttaaccaacgtttgaccattcgtcttattcaattttattatgtaaatataaaaatacttatgtcatgcttaaagaatatttgattataaatgaagtcataataaaataaatgataattacataaattttttgaataagacgaaaggtcaaacgtttatcaaaaggtcaacggcgtcatacattaaaatacagatggggtatatattatctaattttagatgcatagcacttaaacttactatagcagttaaacatactaaggttctgaggtacttcaagactgaaagctaatgttgttccgttacttttgcttagatgaaactccggtgttgcatgtattctacagtttagcgagccaatgtggttggcaaattttattgattgtattgcatataaaaactgattataatcaagccttaagaatggcctttcagacaaccaactatgtggtgttctaaatattagccctttggctccttgattatactgtctgtccattgataggatgcgcaacacattggctgatatttccgtggcacaatttgttatgtactgcaaactatgtaacagtggaaagaatgttttttctggcacattttttacgtactatctgtccaaaaaatggttatgttgttccatatggttatggttttatctgatattgacaagtaaaaacataaattccgtctacagcaatatattttattatactttcatggactccccaatagaactatgctttggattatttggtttgctcgagtgctctcattgttgtgctacctgccctcactgatagggcgcacaacgtgcgcccaaatgtctagttagaggaaagagcatgagggagagagggggaagcagtaagggagggctaacatgtgggccgtactattatttttattttttttccttgaataacatgtgtgagaacatgtgaatcaagttaaatgtggcacgtcaggtaaaaccgcgtcacattggataaaaccaatatgcaaagcaccaaaggaggcaaattggtctggttttgaatgttaaaagaatgtgttatagtatacggttgcgggaggtaaatcatacttgctccatagttgaaggaggcactatggagttttcttttttgtaatccccgaacccggacgtgattagagcagagcagtgggctgaatttaaaggcctaattagttgatggggtcgttgtcggcttaatccactcttgctctgaattaaggcttgggttagttcccaactttttctttaaacttcttaacttttccatcacatcaaaactttcctacacacataaacttctaactttcccgtcacatcgttctaatttcaatcaaatttccaattgagtaaagtgcattggcggtccttaaacttatagggttgtgtcatataggtccctaaactctcaaaacgcatatccaggtcctagaacttatcaaagtgtatcatttaggtcccaaatcgacacatcccctctaggatcctacgtggcgctgatgtggcatgccacatagacgtgacatgtcattttctttttttcttcttttatttttctttttcgttttcttctcattcttcttttttttcttctgctcgggtcacagagaaaggagacaaaaggggaaaaagagaagaaaaaagaaaaaggaaaaaaatttaaatgggtcccatttgtcagtcaaaacgatgccacatcatatccatgtggcatgccacatcaacgccacgtaggatgctgaaggggttgtggcgatttgggacctaaatgacacactatgacaagttctaggatttggatatatattttgagagtttaggaacttagagacacaccccaaggactgtccgtacactttagtctttccaattttagcgtgaactaaacacaccttaagtaggcatcttagttgactcgtgggctgatttcgttgtccaaaataggtgggcttaattcactcgtgtctttgagcagaagtaggtgggctgaattcagtagtaggtcaagctatgtcgaatttttaaaatttttaatttatttaataaaatatttacaaaaataatttttttcatcaaagttttatatatctacacccttaacatcctcagggagggcttttttaaaaaatcatcctttcaaaggatgttttttatgacgtggcacatgtccgttggtgtattctaataaccacatggagggtgcctggctattttgcaggttgaccccttgccgcccttctagagtgctatgagggggctgtttgcaaaatatcgtaggtcgctatttaacaggtagccctattaccgccgtcctagagtgctaaagggtgtcaccttttaaatttcacacaaccattaaaaaacgccaaaggacgtgtgccatatcataaaaaatgttctctagaagggtgatttttaaaaaatgtcctctagaagagtgattttttaaaaacaccctcccaaggacgttaggggtgtagatttgtaaaactttaattaaaaatagttttgtcaatattttactaaataaaattaaaaattaaaaaaaattcagttatatcgtggccgtcgtcggccgaattcgtgacagtaattagatccgtaccaccaatgaaagatatcaacgcccctcgcagaaaaaaagtagaggaaaattatcatcaactgttatcattgcactcgattgcctcaggtacttgcgattgtgcctgatgaatttactgagatttatcacgagtaatttctgtcagttgtaacgatatacccgttaacagttagatgttcatgctaactttattaatctcaagatatattggtccagtattttgaagatgtttataaaagtagagtgtgtgttgtgagttgtgaccatctacatttgtgctgtgtttttttaagaaataatacaaccttctgacgatggtagaattctctatgattaattttgaaaattatttttgtttagagacgtctttctagatccttgtgaaatcaaatttggtgcggcaattatttcatttcattatatgaaagaaatggaatcagagttattataaatttatgtcccgtgtggctctaaataatggagtatgcaatacttgggcaaagtacgcgaccacacgctgcaaagatcagggcagcttatgtcatctcctcctgtactccaggctggttcgtatcaaatatcggcaaagatttggtctccagctcacttagatctcacttggcatcttttcaatcacacaatcatcaatcgaaaaaaaaatgcagcacatatgcatgtcacctttgcattatgcgcatttatagtgggtcaaatcctcctacacacgatcccaacccaattaatcatcacttattaatgccttctctaatctcatcttaattaaacacccgtagtctatactactccctcctgctaaaattctaagaactattcaactctttggtttttcaaaaagaaataaatcctatttgtagtcactatgtgctaaattaaattgttaatcgaaactaaaaagctattttatacttattgattacatgtttgttggttttgtcacgttgtgaatgagttaattattttttagtcttgatgccaaaagaaacaggtctgacttttggatggaggaacaataggaacatacttcatatatcccaaaataaatcttaacatagcctatgtctaaattcgtatataaaagttaatttattttatgacaaatggagactaatcaccaagggccccaacctagacacccgaatatatatgatatatccaacagctaccttctgaccggtagacttaattagagctaacaagcataattattgcctttatcacttcggtttttaatcatggactttaagataaatcaagttgggtgattaattagcaacaagagtttggtcggccttgccggtagattgattcctggtccaggtgcctatgccctgatgccatggagacaattaggcagttgggcacaggaatgatcaagcaagtggtacattgtccttgatgcgtccatgagaagtttcggccgacacaagatcagaaaatcctacattttcttgagatcacattcatatgtgatttcagtgagctggcaaccaaaaattctcaggattctctcgaagttgccagcatacaataagacaattaattagtagtacttgcataatgtatgtctgctttctggtgaattcctaaggggtaaggatgtgtttgagaggagaaaaagaagattgagaatatatgtaaaacgatgtgaatgatcaacatattattaattaaatattaattattctaaacttaaaagtagattaataagattttgtaaagaaaacttttctatatatttctttaaaagaagaatgtgccatttaacggttcagaaaatgtgcacatgaaaaagcaaatattttttttcgctctatctccttccaacggacacgccctagctaattcatggttgtctacagttatataattttgtcgttaatctttcgcaccatgctatatatctaagccatgcgagaggtggtctccttcgatgttttctaaccctgtgttctttgctcagtgttcccaacccgtcttcctcgtgttccgcacgtacgttcttcaagctgctaaatggtgcgttttttttaaaaaaaagtatacgaaagttgttttaaaaaaatattgattcatttttgaaaaaaaattagctaatactgaattaatcacgcgctaatggacccttccgttttccgagcgcaggaaatggttcccaacccatagaaataaaaacaaccttgtgatttgtatcatagtggttgtaagagcaagtttaatagtatagccaactatcgactccaattcatttatagccaatttaatagctcattcatacaataattatctataaacatatactacatcattaatatatgctcccacatcttatacacataacgtattggagtccgtgttgcagctggctataaatctgtaatccgctttccttctctttcttctcttatctcctccatgtatgcttacagctaacttgtagtctgctattatattcactataatgctttagtagcaactaccagttcccgagtttgactccactagcaagtgaattttcggacttgatttaaaaatgatcactcactcatcccttggatcaaaacaaatgttaaaaactgacctatggtaagtcggcagtcatacacaaggcaatggtctcaaaacacatgttaaggcccaaaccgtgagggcggatctgtgtgtcaagatgccagagtgtgtgccctttcgctattagctttggttgaggtttctcttagcttgaaaaagcggttggggtggtctttcttttgccggtggagtttttttttaataggaacatgataatggaatatttgaaatgaattggttggaaatgatgcatgcgtgggggctattagtaggagctattggacttaatttgtgctctagggtaaattaaaacatcatttgtaaaaagaaaagagtgatgaggaagtacatccaaagttcatatagtacatgacctatgcctagatgagaggacatcatcaaagagattgatataatccgaatctgggaccgcagcagtcacaatgagcagatagatgcgccgaaaaccgaagatgtgcgcacttatgaatgattgtgcatacgattctaagcatgtatacatctatataaaacttcaattcttatgtttttcttttccctcctggcaaacacaaaactatataattagggtgtagaactagcttgtagaatagctttcttgacgattccaattccttaattcttagacataaccttacttaaaaaaaaatcttagacataactaaggtgatcaaaattttcagatttcaattccttgcaatatttcagctttatcatgaccaaaattttcctttatagacggtgaaatttacataacaattaatatttcggagtacctacagtgttgcatgcgatgtctatctttaagaaaatgttttgaacgggtcactacatattatatactgttacactcatactaaaggtgggctatagaatctgttcaacatatggttttatcttttatggctgcggctgctgagtccactgcttatctgtgcttatggcactgggttatagccattgcctagacatccgaataggactataataatacgataatgaaatacagtataattgatagtacaaattgaaacaacaaaataatatataaatggtttcgattattgctgttgacaaccataccttgcaaggactactagaatacgaccacaagcccacgaggaaagcacctttgacatggacggatggatggacgcccagcaccgtggctagtagggcgcacgttcaatggtggccgtcggtttcctatcactagttggcacttggcagctgggaaattcccccggatatcatcgatcagatccaaatctacaaggcacacaaatcgatcatatcggcctatcgatcatggatggcatcgtgcagaagcaactgattaagcagacatctccatgtgatccggccattggcctctatgtaatgcatgagaggggctagctagctcagtgtcggctaaataggacaaggacaatttaattattttcttatagaaagaattatacattactcttttcggttataaatatatttaaagtctaaaataatacttaatcaaagttttgatattttgaaatactgacaataatcaatatataacttatagaattaatgctttgtttgatttgcctttaagccatgtaaaaaggtacgaagtagagtctaatattaactctctgtattaataattcatgtcgttagagagcatcctactgcaatagtagagataataaggtctttaaccattaatgcactaaatattttttattatcactttttccttttctccaccctcatgtaacaaatttttcgttaataaatactaaatgctaagagtcgactctgagccaatgtcacgtgtagcaacgacgtttttcttttcttccttctttttcttccacattattaccaaatttacttacatgataacgaagagagcccgttattaaacatcattctacatgtccaaaggggtactccctccacagggagtattatcgtagtacttattctaatataaaattattgttaaagttttactttaaagactaaagaaagttaaataatatatatttatttatgatggggtgaatatattgtcattaaatatcactgttcacacgtgcagtaaaagaaaatcaaagaaatcagcttatttaatctagagtaattaatgagtgagaatcaaatcaacagcaaaatcaagacaccgcacacagtggatcgtctctagctagagtcattagaccacctccaacgcacagttagagggtagctttaaaaatatccgatattgttgccatgtcagatatgggcgaggcgtttcgtgcgacgttgacgcatgaggcacgcttaatctcgtattgaacatgtcccttgtgctgcttgtaaggaaacccagaagaaaggaagaaattgagagtttataggatgaagctagtggaggaattggttatgggagttttgttttttacatacagagacctcgcactttaaattcatagaaataagtctacttcatccctgaagtattggggctgaattcataaatgccacctctaaaacctagatgtttaataggtgcttaaaagtatgttttttctatgcaatacgctaagatatgtgcttaaaaatattgaaatacgttaagtgcgtttggttagagggaattgttaagaagaaataggagtttggaataagtctacttcacctctgaattattgaggctagtctatgtaaccgccgaagtacaaaacatgatattctaaccccccccccccccacaaaaaaaatgtatatatatcaaaaccagtttaaataaccctctagaatggttttgctatgcacatgatgacatggcaatgattttggcctcttggacctaaaggagactattgtaacaggctatgcaataagtgaatcagcctaagaatgatgtaaattagtattaagatatactccctccatcccatgatataagacttgtaagcatttcaagattcaacttctaaaatatttaaccattaattagtataatataaattaaattttatttgttaagaatattatattgtattgacatttgaatttactttcatatgattatagttttgttgctataaactttatagtacatgagaaattataagtcaaccgtaccaagtttgaccatgccttatactattggatagatggagtaataaattttaatcttgccgatcagtgagtgaaaagtaatagttagacaaacttgggtttattagactaatctttgtgtcatgcaagccaataccgctggcacgtaatcatttacatgacaaaatcacctacaaaactatggtaggggttatttgaaccggttttcatacttcaggggtagaatatccggtttcgtcctttacggagttaagtaaaccaatcccaatacttcgggagttactagcaattgtagccttaaaaatctcgaactctactatgtctatattttcgtacagttttagtaactatatagttaatcttgtttgtgataaaatgatagttatatttagagaatagtcgaaaatagatcaatataaatgaccaaataaaacatacaacgcacaaaaatggccatatactttgaaataagaaaaaaaaactgcgtgaaatcgtgcatcgagcttttatcggcctttaaaggttttagagctgaaaatttgccctcacagacctctagtctgaggagaacaggctcctcggacttaggaggtgtccccgaactaataattgaggtttaggtatcagtttctggttcacggtacgtagtagcaccattgtatcaccgttgattcttcagattttgagcgggtttggtgcgaacaagcatagaagtgatatttttatcactgtcggtgaacgtcgaagatagtctgttatgtggtaggattgaatttagctataatgaacggttttcaaatggttttcacaaaaaaaaaaatggtcttgtaaaccctgcttgaaacagcttaactgcacaatgcaagttgcttccgagagcaaggaagaagaaagggacaccagacacgaaacatcaactaaaacgcgacctaattgtaagtttctttggaaaattaaatatccaatcggtcacgacgaagaagccaacgaacacacgtacaggtagtgggccaactcccgtccagccacacgacggcgccgacgtgattttaaattgcagcggcgattaattaattaattatcgaagtctgcggcatgtcgtgctgctgctactcacatctaagttactcagtcttaaaataaatttatttttagtcccatttattaatcacaaaataagtatcacaaaataagtttatttctatcctatctcatccctcggtctttaccaaccctcacctttggccaattccttcgccatcgccagcgtgggtacattcgatccacagtacctttgctcgctgactaccctatcagtcgaggcatagaagaagaaacccctccctaggcttcaacacaagttaccactatatatacaaacggattcgggcacgaacacttcaaatcctagcactactacaaaacagatcttcccaaatggttaaaatggtttttcacatacgggcaccactactgcctccagcaagatgtatgtatgaaaagttacgatttttacaagcgggtaccgaaaccgtatatgaaaatgattttcgtagaaagcctccttaagagggccatctagaaaaaatgattttcctaaacgggtacatcaatactcccaattgcacaaagttttgaaaaaagaactaaaaaaccaaaaaaaataattccagaaccccgcttcgatacccatttgcaaaaattcatcactgaagctgccatcctcaccgcagcaatccattgtggtcactagatccgccgaaccccgcttggcccatcgccatccatctgccggtgccgacaatcacgatagtcgaatccacctcttcctgggcccgtggctgttgaattgttgattcatcacctccccgagcacatcgctttgattgccagttcgctacctctcgagcatgccgccgtcgatcgatccaccactttgttcccggtgattgtgggcgccgaagccgccactcttgaggggcgcagccgtcgaatctgctgctccccgttgtatgcccatcatcgatccgtcgcttcccgagcccactgctgttgatccacggcgcccggcaactatgggtgcagtatctaccgctccccgctaggcccatcgtcgctccgccactcccagggcttgttgacacctcctactcccgtcgctgaccgattcgcagtcgagagagaggggaggtaggacaagcgagagacgaagctagaagggagaggagacggagagagggccagtggatttgctggggcgggggagggccgggaacttagtgagtgtcgtcgctctcgcctgcgcctcacttgattttataccaatagttgttttcctcaagcatgtaggccggtattttcacgagcattttttttaaaacaactcgcacaagatagtgcgacgtttctattgatataataggaaaaaaatataagtctacagtcctgggagactatagtcaggaaaaagaaaagataaccacaccacgcgtctacgtctgatcctactgttaaaaacagaacaagcccataacacccctaagggatgggtcttctaaacgacgcctccaagaaggaaatgacgccaagagcaccgccgctgcccgtcctagagaaccaggacgtggttttcacttgaagaaaccattgggagaggagagaaaacgcagcaacgaaccatggggaaagcgacgcccgtaggcgtcgccattgccggcctgaaggctaggctttcgcccgtagttcctactctcccgcaccaatgagacatgttagattcagcagtaaccaccagctagtccccttcgacgcgcaggcaccgcgccgatgcctcgtcgtcggccgaccaacaaagaagggtcttgaactccggtgttctccagcttcgtccacgtggttgggttggaaagggagagggtgagagagaagaatggatcccctgtcttcccctctatcctacgttacccagatacggggatacggatacggatacgcgatacgtcgatacggggatacgtcattttctgaaaaacatggatacggggatacgttcacatatatgtatataaatatctatatataaagacaaatatcaactattcaaagaaattagctaattacaatgtagcaatttttctgattatctcttgtagttgattcaggtgggtgaaagtgaaacgatggcaggtgtagactagttgagaaatagcacaactaatatatctaaaaaaaactctttgatttttccgtatactctttgactattctatttcttctctaacaactcaacatatcaccgcatcccacagtggcttcttctcaccatcatttggaggaatgatgaatctgcagctagattagcaaccgcactagctctaggagtgctagatgcattgacacttccaatcccaaaaatcatcagatctaaaaaaaatactagctatctctgtatattgcacttctgccaagaaaacaggaaagaggaacaagatcgaacagataagatcacatgcactcaagcatcgaagaggcaagcaaaacaagtcaaatcgttcaatggaacttgcctcaccgggagcaggaagtcagtggctgctacggcggcattgtgcctgttggcgttgggtccggtggtggaggcggtgaatacatctagacgcagatctgcattcggcgtctgaaggtccggcatgtagcgacggtggcgctgcgttcggcgcttggcggcggcggctcagagttcggcctttggcgtctcgggcggcggcggcggcgggggaaagtgccgcgagggttgggcatcaggcgagaaaagtggagacagcatattgatcgttgccatgcggacgtatcgagaacgtatccagatttattttaattgttcgaaaattgcgaaaatcgctgatacgtacgcgatacgtatcggatcgtatccgatacgtatccgtatccctccacgtatctgatacggatacgttgcatttgtgacgtatccaggtaacatagcctctatcccgcactgacccatctagcatggccatcttgcggtggcaagccgctgccggaaaaggactgacgcccagaaagaagcttgccacagtctttcggcaagcttgccatcacgagaaattggcctagaggtctgcgtaaaagtggatctattttcgcaggtagtcggtgtcacgaaaatcggtttttatgatgtagtatgaaaaagaacgaggctttagtggatatatatccaatcttacggttcaaatcatggtgcctataagtgtacctaaaaatattcgcagaaaactgtcataagcagattcacaatcaagtacacaggcaaggacgtacgctacactgacgtggatagcaggataatttggcaataatgtaggccaatgcaggatcctgcccaacctgttagctgtctcctcacctctccatgatcaactcacaatccaatcacctcctctcttgttgcctcccaaaacctaccgttcctactataattaagcacggccgttaattgtccacccgaaaaccaattatgatcactaatccatttgtattaaataaaaaccaaattgctaatgatctaatcgatgacaccaatcatgatactccctacataataaaaaaacgaatataaaattagatgtgacgcatagtagtactacgaatctgaacatatttatatttagattcgaagatctagaatatatcgtatctgctactatatttatgttttatgagagatgaagagggtacacatgacaggtgggaggtagaattgaatggaggtattaactaaccaagtggctaattaaactagttaattaattgcaagctaattaagctagctgataaccatatatataaaccccattgcaccttggcaaccaagaagggcgagaagccaagaaatcatctctccatccattgctcgcagatggacaagatgatgcggagccagggcggcggcggtgtcgccggcgagtaccagtactactaccatggcggcaccggcgccggcggcctcgtcgaccaggagatggccgtggcggcgccggcgacgtccgacgacgacggagtggtgctcctcatggagcttcttgatggcgaggaggagatgggggacgactactcgccgtcgccggcggcaacgaccgacggcgacggcgacgccgatcagctgagccgcgtgatccggtcgctcgaggccgagatcggcggtggcggcgccaccggggcggtggcggcggcgacggcgacgagggacagcgacgagagcatggccgccgccgggccggcgagcgacgacgacggcgcagcagcagctgggatcagacggctggaggacatgttttccgacgacctcgacggctacggcggcggggcgttcgggtacggctggccgccggagttggcgttgccggcggcggcgagctggtgcgtgtacgacgacgagcatttgtactatggagatggctccattgatgagcaagtgtacagccccttgtgggagcaataaatatgaataaatcgatgaattgttgtagaaattagggaaataggttgatgtgcatagagtaaattatgaaaatccgtggatatatatcacagtgttagcatttctccagaaaaaattgaaaaaaaaatatttgtaccaatataagctctgcttgttcagtgtacaacgtaccctgcttgccaatcaatcctcttttttttttccttgagaaattctaacaaatgccatcagtaaagtgcataaatgagtttgtcttataaatgccatcatatgcaggttttcgtccatcccattcagttagtccgattttatttatttaaaatgtctaaaatgccctcacaaaactttaacaaactcataggcgcggctcatatatggtttaacttatgggtgggcacctcggcgatgagtgggcaaatgaaggcgataacgaaaagggataaaattacccgtaagatggcattcggtagaactttacatctattaacgacatatggctttatcttttcgcttatgcttatgctcatcaggcaaaatttaaattgttaaccttaaatttggagctgattttaaggtttttttcatcgaaatttatttttcagcatttgcttttatatcgctaagaacatgtatataaaagttttattcacaaattattctttgtttgcaaatatgctgtttcacttataattccgatggctccgataatgtcgatggtaaaatttagaatttctctttttccttctataatcgaaataatgcgcgcaccccctgatcgtgtctcgtggggcacgtccgcctagtgtagtagtgttgtcccggccatcacctttgtgaattcctaaaattcaatatagcttaaataaaagggtataattcggttaggatagcttctcacggatctaatggattcaaatctctgggcctgtttaggggaagattaacattatgagaagctactggttggtagccaatttataagaatatgaaaaaactgggtttttttagctcctgacttctagttcattttctgaattatataattattgcattttctctcctaattcctagaatttgtttgtttggatgtgttcaggggtcaaagcatgtgtaaggcttggccttcaatcgtatttagaccctgtgtttgaacgctccgtgtaatcgtgtggacatgagtatatatggtgtttgtgtgagcgttggcttgtacttgaaaaatcgcaaaatctaattcgagagcactctcaatttagtcataaatagcgacggacatccagaatccatatatgtgttagctggaagaatcttactttactatagtactaatccattaagtaagtaggggaaatatttctattatctatgcttcaaataaaattttcttttaaattactaatccgattataccgttgtgttcgtaataattaaatctttacaacaagatctcacatgattatattttgatgaaaaatcacaaattacttttatgatatgtctaaattacttttagatttcactaagttacttcttagacatataaaagtaaatttagtaaagcctaaaagtaatttacatatattatagaagtaacttatataaaaagaaagtaactttaattaatgttttttttcattgaacaaattatcatatatataatttactttttagatttgattaaaatacttcctatacattcgtaatgctttgaggtgattacttttattattgtttttagttaattccataatttgtgctgattaatttaatttctagatagagtcatgtttttatttctacaacggatttaattcaaatgacatgccgaagttaccttcgttttgttctaagttacttctataatatatgtaaaatacttttaggctttactgaatttacttttatatatctaagaagtaacttagtgaaatctaaaagtaatttagacatatcataaaagtaatttgtgattttttatcaaaatataatgatgtgagatcttgttgtaaagatttaattgttatgaacacaacggtgtaatcaaatcgtagatcggatgagtagtttaagagaaaattgtacttaaagtataggtggatggtgttttttatagatagaatggtagctgatttagacaaactaactaccactagctgtgtagttacgtccttgaaaaatgtaagaaaaatgaataacttcaaaacatccaagtaaatgagactgggctgagacaaaccttgggccagaagaggacgaccgggcttctgttagtgttgagcttttcataggccgatggtgcacttggcaattctactctgtggaggcccagcaaccaagaccctctctctctctctctctgtttttttattaggactatctttaaaaaaactatcaaatctaactataatataattcaactataactaaaatataaattttatataagtattaaaataatatatgcaactttatatgtagagactacaatgtagtaacaatgtaactgtagtataattacactgtagttacactacagctatattatttttgcacaaaaaacttgcgacggttttttagcaatttcgtttttgttttgctggaagctgctaccaaagttttttttttaaaaaaaaacgagatttggagggactccctccaaacattttgtaagaagaaattgtgagcatgttaaaaattaaacatgagacttcggggttaaaatcacacacctcttaccactgcactatcggtgcatgctaggctaccaaagcatagtaccaatcacgcattcacactcgatctgtatgcacagtcagtctggagctgggacacaatggctttgtggatagctttgcttacaaaatgcaaagcatgttgaaatctctggcatctttctcaaaggtcacttcatcgatctagttgtgtacaagtggctcgtcccctaattaatataatcaggcaactttagttatttttcaccttttgaagttacacggtcttaaagtgagccaagacgtgcttggctgagtgctgtgccggtgtgctcaggtaaaaaacgcatgtctagtaactagaactacgtccatctaaaacacactgttcaccttttgttcctgatctatccatgtcgcctttgctagtcttcctttaattagtcactcaatcaactaattatctagtcactcaatcagctaggttttccacatcagccatgcaaacagcaaaaagaaaacaagaacaaggcaaagcatggtcagcaaaaagaaaacaagaccaagaccaaggccaaggtaaatcgggatcgatggcatgcgtgggtgaggagtcccggtggcggcgtgatggatagcagaagacgcaggatccgtagcagatcactgtggagagggattcgatggtggtggcagcatggtggagaagggggcgcgggcatagggtttctgggtgagtgcaagagagagagagagagaggatgggagtgcggtggagagggtgtgcggagatgggcgctagcttccgtgcgagagaggaggggaggttgagcatgggatgatctcttgagtcgttcaattgaatgtggatgaatacggttagttggatttgaagaatgagtaacgcaggtgtaaaactcagttggtgaactatatggtaggtgcaggattgcacctgtacatagcaacatggatctgaatttgctaattaccgtgtgatcgctccccgcaatcaccttttcccctttttttttcttatcttttccttttctagaaccgcatatttatatacctaaactttatatacgaaaagtttatacacctaaagtttacacacttaaaagtttatagtcggaagtttatatatccaactcaaattcatatttgaatttaaatattttttttgttattaccaaaagtttgtacctgcaaagtttacaatgtatatatatttttatgtataaagtctatacccatgtatatttttagcgcatttgattttttttcttttttggttgttttttaatcaatctaaaatatatttttaacaagtcacaccgtgggagggggttgggagttagggtgggagtcgtgtgcgcctcgggtgtgggccaatcgcgtgccatgatcacccgcccattaggcgctcccgcatggatctattatatttgtagagatagatagtagtttatatatccatgtcgggttgatgtagtaaacatgcaaaatgatggaagatggttatacatactcctttcgttcataaattaatctttagagtacacggtttggttcatatttattattaaaaacatgattaaactcttaaaactttaaccctcaataatttctcgatgcttagtttagaaataaaaaatggcattcaaatattcaatgatttgcctccaatctctgtcctaatatataaacctcttacactttataaaaataatttaatattaaactgatggcctaaagtttcataaaagtttgatcatattctatcaaaaatgtcaaatatttatgtcctcggaatgggtatatattattccaatattgattagacaacctacatacgtggatatgccaatcgacaatagattcatcaactgaattacccagaaatggaattgaaattgccaaccacaactggtcacacaggacatgcatgtagtgcaatacttgggaactaagtatatgcatagcacatggattcctcgaatgatttggtaggtgcgtggctttacatacgcgcttagcttctttttgttgctttcgagtacaatgttgctttagagcaaaaatcatatcgatcgatcgtgtaaaactcaccaagtacaccaaacatattatgaatggtccatcccaccgacaccgatcgatcgggaattcgggatcacacaatcatcccaacattatttacctttacatactgtaataaaaagggtctccacagagttaaacttcttaacaaccactggagtagccattatcttcttcctttaatatatgtgcaatttagacttgtcctataattgagaaagatattgaaatagttgtgtgcattcatagttattgtttaggtttactgctattcattgttaaaaaaaaatacacgtagtattgtgttgaaattttccttcttgtgaccatttttagctatgcacatgaacatagccggaaataagatatttttgagatggaggtagtacagtgatgtgatggaattgtttcgtaaaaatggtcaacataaaagaaaataacatcacaacctgataaagaacaaagtcaaattttgtgaattaatatttgacattattgtcacatagtatatcatatagcccaaaacctcagcctttggccaccatgaggtagctagcccatcaccatgcattatttcccccaaagcagattactttttccccttgagatggcaaagtagaccacttagtgctccctaaagcacccttacccacctagcaaacgacacacagtcatcagtcatcacaccacacaaaaagcaatcactcatagaaaaaaggtaaagaaaatactcacacaaacgagatgtaaagaattctactaaatctcacactagaccatacaccttgcaagactaaaacacggtaacaaacaacaaactcaatctaagcacgaggaaattttttatttcgactgtaatattagacccatttctctcgtagcatctaagtaacagtgaaaatatctcgacgaattatataatagtgtcgctcacttctacaaatatatatgcataaacctatttacaattgaaggttggaaaaaaccagcggtgaaatgcaccacattcttagagaaggtttgttatggtatgacagaaaatacctcgagctaatggtactactgggtaccaaatgaaatctagccgctaaattactagcgccagctgttgaatttgtattccccctcactatctaaattgaattatatttacatgtttataaagttatatatgatattacaatctaaaccatttagtttttttaacggcaagatgagcttggtaagaatggttttttttcgaaacacatgaataaaaagaaacccgtagggttagagtgacctggcacctaaaatcctacaaatggaaatacataagagaactaataaatatagaaatgcctatgttggatggagtgtataaaaaacacaagtatatcaatggaggattttttttcaatgtagaaatgtctatgcacaaacaaatttttttttcaagatgttgaacctcattttgaaaaatccttcaaaattcctatatatgatttaaagacaactctaatgaattccaaagcagtttaggagagccatttatttatttcgaaggatatcctccaaaaattccttcaaaagccatttgtttcctgcctgaaggttacgaaggtcgaaggcagagccgttgccccaccaacgttcgaaaaagccgtttccctcccggttcttccaccacctccttccccctctcacaaaaaaaaaaaaaaatcgaaaccaaatcggagatcaaaagcgagcctgcatccatcagccgcgatcgcccaaaaaagcaaaagcccacctccgcctctgcgcccgccggcgaaaaagcggtaaagcttagtggcgaaggcgaaagccaaagccaccccaccctcgccggcataaaagccgccatggcgcagcctttgcgcgcggaagctggcctcctcctcctcctccatccttcttcctcctgtggccgccgcgatggaggtggagatcgtcgaggtggggccgtcgagccggccgctgcggtacgtgccggcgcagcagcggtggaggccgacaccgacgccgcttcctccgcctcctcccccgctgccacctcctcctgccgcctccgcggcgtcgtcgtcgggcgccggggacgcggcggcggttgcgtccgcggcgaatcagttcgacagcgagaagctgccgcagacgctggtgtcggagatccgcccgttcctccgcgtcgccaaccagatcgagcacgagtccccccgcgtcgcctacctctgtaagagctcctcgctcctcgtcccccgccccgcgccgccttgcgtctctctagttttcctgttctttttttttttttttttttttgtccctggtccgcctgcgacgtgttcgtcgaaatgccgaagacgaagtaaagggaacagtgaatgcgcttgagcgcttgaggcgtgggagtgggacggattggacgcttttgccgttttgagattctacccgagatgatggcgtatgagggggttaacgagacaggatagaagattcgaggtggttttggtgccacttgttccggcttgggaatattctgcgatactctctcgctggaaatgatggttagtgatccgagatactaccccgtgtttggtcatctgctgctgtcatgcatcttcctcaacctatgctcccaagattcctcgaagtgaaagagattgcttggcacataatcgtcgggaatattctggagttccctttaaggggaaaagaagagatagatatcagatgttagctgtctataatatccaatgttgaatggtctctgctaagattcacttgtcaattatctatcatgggcgaatcagttggagtttattctgcacggaacattattctgccacagctgttgcatgtgttcccatgattagctgagtgggtaggttgttggaagccttgagagttgaaacctgtggtgggtttacaagcaggcaagtcaaaggtaccatagtttgggttctaaaataaagcccttaaccttggttacagaagatctcttgtcctttcctttaggtgacataactcataatattgcatcactcaagtgctttccctgggaaataccgaatacctctaatacaatcttgttccaacctagttaaacctgtcccttttttttctttcacattgctgagcatttttttggtcaaaagtttatttccactgtccctttgtttttctttcacattgctgagcatttttttgttcaaaagtttatttccactatgtaacaaaggattgtaatcaatggatgctacaaagaaaaaggaagtcttgcctataagagtcacctgcaaaatactgaaaatgtgtcatttgacaggtcgatttcacgcctttgaaaaggctcatatgatggatccacgttcaacagggaggggtgttcgtcaatttaaaactgcacttcttcagagacttgaacaggtgcatatactgttgccagataattgcattcattcaaggtttgtgtgatgcatttaagcatcatttgtgtgcttagagaacttccctagttctgtaacacaaatgcacctttttttttcctcatagacatatcttgtcactaattagtactagtatcatcgttgattaagaatgtacctcatgttgtattttgttttcaaacaggatgagaaaagcacatttacaaagagaatggcaaaaagtgattctcaagagatcagattattttatgagaagtaagatttttttctcagatcatacaagtcggaactgtgtaatgtagactagtttctgcaacattattcaactcctgaacccaaaccaaaatgcgatttcattcctgtttctgtatctttttacaggaaagagaaagctgatgagcgtgaacttttgcctgtcctggcagaagttctgagggctgttcagattggaactggcaaggaggtaggatatatttacaaaacaagatttatttatgtaccaaatgctcaatatttaatgctttcaatgaaattgcagaaacagaaacgcattgctagcgaaacttttgcagataagtcggccttattccgatataatattcttcctctgtatcctggatcaactaaacaaccaattatgcttctccctgaggtttgccatattttttcctactgaaaatctcaaaaagtgttcttcagatttattgtgctaaaggacaattcagatatgacatgcttataataccaagcgaatcttcatgtttggtatggtaaaaaaagctctgaaactttcttcacactgggatctgtaccgagttgcccagatggaatttggaagaaaaatgatcagacctccttcctacaggatatatttgctctacaaataatgtggctaagtagcatagtaaagaatcattttttttaataaattaacagtctatgtaattttagtaccaaactttctcataacaaaaagcaatacattactctagtaatttacttgtcagaatcctaatacttttaacatgttaattatagcgtttgcagtatgcatttcaagtgaaaatgcatgaatcaacttgtgtgaagttaattataatctatacatactgcttttagaaaaaggtagtgatggtggtgaatatgctatttcacctctcaaccctacactttcaatatgaacttttaggaaaaggtatgctatattcttatttagccctgcgtttctttaatggaaatggagggctctgccctttgctcaaaaaaaaaaaaatcttatttagccttctaatatacaaatttaacatggaaagtttcaagataaccggattgccacatatatatatgtagtaggcaatctaatttatgactagaatatagagtttcgtaaaccttgtaaagtattcactgtaaaaacttgaattgtgtgttcaatgaatcttccatttgtttagaaaaatattaggacatgtataatttattttttatctacagcaaatgcatgtgtatttatctagtatacttttatacagatcaaagttgcagtgtgtgcggtgtttaatgttcgcagtcttccatttgctaacaccaaggatcacaaaaatcagatggatatttttctatggatgcaaagttggtttggattccaggtagactagttatttgtcttggtatttaattgtcagactagtaccaagtattgttctcatgcaaattgcatttcagctcagtattttttttttgttagaaaggaaatgttgccaatcaaagggagcatctcattcttttgcttgcaaatatgcatgctcgcttgaaccccaagtcatcctctgaaacaatggtattcatacgtgaatattttgctttgcctgtcttatttccttcatatagaataacattctaatatgtcttctttagcttgatgacagagcagtagatgaactattggcaaaaacatttgagaactatctgacctggtgcaagtttttggggagaaaaagcaacatatggtagactgtgttttatttctcaaaatacttgcacaaataactgaaaatcagttcaggcgcatttctaggaagtattgtcttaacaacaccacctctttgtattgcaatccacaggttgccctctgtgaagcaggaaatccagcaacataaacttctgtacatatctctttatcttcttatatggggagaagcatcaaacttacgacttatgccagaatgtttatgctacatctttcatcatgtaagtctttccacttcatattttctctgtgcttgcaatgtactagtgattcgaaactacagtttatattggatctttcttcaaatcatttatgaacaatagatttatgcttaagttgccttgtctgtgcagctaaatttgcattggtggcaaataaaaataccatgtaaatgtagtttttgtttagttctatcctgttttatgtagtactactttttgaataagtatttctttagcaaactcttaacgtctgattagtttctgtcttcccagataaagttcttgctaaaaggagttgatctagataactagtgcttttatgtgtttctaattaaagaaacaaacctacttcacttgttctaagcagtatatctgggttctccagtataaatgaggcacagaatttttggcccaaaaggtgttctcactttgagagataaaggtaaccacacttcctgtttcagatgtcgtatgagttatatggagtactctcaggagctgtaagcttaattactggcgaaaaagtcagacctgcatatggaggagatgatgaatcatttttgaaaaaagtagtgacgccaatatacaaagagatatatgaggtctgatatcattttcttttcaacttctcaactcagctttgcaattttgaaatgaaatgctcatctactttatctaatgaaggaatcactaaagaacaagaatggagtatctgatcactcaacatggagaaactatgatgacctcaacgagttcttctggttagatactatgctttattgggtaatagcttttgctagtaacaggtactaatttcttttacggtgcaggtctgcagattgcttcaagcttggctggcccatgcgcctgaataatgacttcttttttacgtcaaacaaaaataagaattctcggcttcccattgttccaccagttcagcaaaccgagcaacaaatcaaccaattgagaacatctcagcaaactgatcaacaaaacacccaattgagaacatctcagcaaactgagcaacgaaacacccaattgagaacacccaatggatcctcatcgtttcaaaatatgctcaatcccgaagcaccggggcaaacacaacaggtacttattacctgaagaatgactgttcctcgaacattgcaatatttcgatcatatatataggattatgtacttatcccacactaaacattgagaacataatagctaattggctaaataggttgatatccactagcatctatgatgctggttgtttcatgcatgtgctagttttaatatttaaattttgttatatgtttttgtttattttttggggttaatcatagaactattgttctgtagtgagtaaagctactccctctgtcccaaaatgttttcacaatctcagatgtagaactttggctatggattttaatcatgatatgcaataaaaaaataatatactatcatatattttggaagtatattgtatgaaaaattaattatatagtatttccttcatgtataaagttgattgacttcattgtagggtgacttcaattttggaaaaggtggtgggggtacattttagtttaagaggacattgcaatgctttactgttataaataactaatatgaattcccatgtcctcaagcttaccatatcataactttctacaaagtaactcatcaagctgttgtcatgacttgaagccatgacaagataaccaccgccggaggagagccgggcgatgtcggctaccggggaaaggatgtagatttagactagggagagaatattggggagagagattagactaattgatattcattgcttaacgataatagacacaatcccatccttatatagatggaataacttgactcctaagtaagaactctatctaatcttatcttaagcaatcttatctctaacttgcctggtgtgggctgcctatgggcctcggcctttcggcctaatgcccatgacaaaagtttaaggctttttctgtacattaacatctcacatatgcatagatttaagtgtatttacatgagtataattgttcactagcttttgtttaatttttcctggtattgcatatagcaaactacaagcgacacatctcaacagaagtggttaggaaagacaaattttgttgaggtccgatccttttggcatatcttcagaagctttgataggatgtggacactccttgtgcttgggcttcaggtttggttcttacattaatagttatgaagtgtatacttctataattaatctcattcttcttattctgtcggaacttttggcgcattttgttgttgattttatttcaggttcttataataatggcatggcatggattagaaagtcctctccagttacttgatccaataatttttcaggatgttctgagtattttcataaccaattcagtacttcgagttattcaaggttaatttgacttttcatttttcttatgtatgttattgattgccttgcttcgatgaattagttcttaatatactgatatatctatttcgttaattccttgtgctctatcttcactcttctgtgatatacttcttttgtgcagttattcttgatattactttctcatggagaaccaagagaacgatgagatttagtcagaagctaagatttgctgtaaaactttctattgctgtggcatgggccatcattcttcccatattttatgctagttcccaaaactacttgtcttgttcagctagacgacctaaaacttttctggggatcttctgcttgtcgaaatatatggtggtcgttgcattgtaccttacaagcaatgtgattgggatggcattgttttttgttcctgctgtaagcagttttttagagacatctacttggagaatttgcaatatgttagcctggtggtgtcaggtatgtttagcccaactcaaagttgaatatatgcttaccttttatcttgcatgttgcatttgatattggacattgtttcacgccataattaatccagtggagtacattgcgattcatgtcaagaatcaattcagtggaatacattgtcatgaaatttattttccaatacaaaatcagtcattgggagttcaatatttatttttatccttttacagagcttctacatagctgtgtgcagtgttagttgactttcatatcttgtgcatgatactatagcaaaatgaattaataatgatgatatgtgcagcctgagttatatgttggacgaggaatgcaagaaggccaagtacctttactaaagtaaaatatgtgcattacatttcctatatttcattttggttatttgatatgaactaaacagtctttctacgcctcacaggtatacaacattttggacaattctcttgtcaagcaaatttttatttagctactactttgaggtgctctctctctctctctctctctctctctctcacacacacacacacacacacgcacatacatactaactcagattaagcctcctcctgaccattttgttttataattaaaccaccccctgaccattgattatccagattaagcctcttgttgaacccacgaaagaaattatgaaggtcaatgtgaataaatatgagtggcatgaattctttcctcaaggtgctccctacactcttcatctgttttccctttttcactcaatatggtatttgcagtactagtttacactcaagcccatgtgatcatttttttttttggcaccagtcaaaagcaacgctggagctattcttgctgtatgggcccctataattcttgtaaggactctgtaaacctttatattaatttggatatggatcagaaattatataattgtctttacatttccaacaggtctatttcatggacacacagatttggtattctgtattctgtaccatctttggtggtatgtgtggtattattcatcatcttggtgaggtgagatcaggtgccataaaaactggaatttatttcaggtgtttatatattcttatttggaatactcatctagattcgtacaatgggaatggtgagaagtcgattctgtaccttgctagaggcgttcaatacctctcttgttcctcattcaatgatgacaaagaaaaagggaatattgcctagtttcttggaaaagaaaatatttaaggtgaaagctcttcatctcctctttggttgttgttgtatcatatcatttcttccttcttgcccttttcttagatgatgttcaatttcagaattttggtaaagctgaaagacatgatccaataaagtttgctcttgtttggaatcaaataataaatagcttccgctcagaggatttaataagtaataggtaaggcctgatctttttactgcaacttaaacttcatactctttattatttgtttttgttgattctgcagagagatggacttgatgacaatgcccatgtcactagaacataggtctggttctattcgttggcccatgtttttactcgccaaaaaggtgtgctgatctaccctatgatacgtaacatcccatggcaatatactcaccttttttgagaggccacttaagttagtacttcaagtataatgtagtttagcacacaacctgccaatagttttttttatcctgcagccttttttttttgcgtaaatacttgaaaattgtatatcaggttagctaaaaactttaataaacttactaggataattcaaatattggatttgctttttttttgttagtcacgagaactagctactctttctataccacaaattttatcatcaatctcaaccatgacggacataattattgtatcattagctctcatttggaaactatttgaagtctttactaatttctgtcattaggtataatatctctatatatcaaatctaccaacgaaaactctatatcatcttatgctcgttttccttcaatggcagttttcagaagcagtagatatggtagccaattttactggaaaaagtacacgactcttctgtataattaagaaggataattacatgctttgtgcaatcaatgatttctacgaattgacaaaaagtattttgaggcatctggttattggtgatgtagagaagaggtaatcattttacttcatcatacctgtaatattactttttttcttgtttcaaagcttttcaagtgcatgtccctgtgaatattattatgatgttctacagattctatccagggtaatagctgccatctacactgaaatcgaaaagagtattcagaatgcaagtctattggttgattttaagatggaccatttgccttcactggttgccaagtttgacagattggctgagcttctggtaataaccttactaacattactgtgatacttctatctttttcccttttgtggtttggattcaccatttaatcacagtaatatgttggttttcttctccattttctggttttcgaaattgggaggatttttgcattgcatcttttgaaaccaatctttggccaggtacagggtttcaagaaccataaacagactttaaaccagaggagttctagattcagcttttgttagtcaagctaatctatttcttattaaaattttggaaacatatgctttacaaatttgagttttggatatgaattagacacaacaataagaatgttgctaagaagttgaactgaacgtggtttgaagtgaatccaggccaggtaccagaacttggactggttgttttctataggtttttggtgatttccccttttattttcttccttttgaaccttagcccatgatcaaaggataacaattgtgatggtaaaggtggctggaataatagaattaatcataaggaatggcaatgaacatgatggagatatgtaggttctgtatcggatagttacttccctggggttcaggaaatcacgcaggaggaccgcgtttcatttcattaaggagaagagaaatatttacaaaagagagatcgaaagtgtctctcaagagatcctaaaatgaaaaaaagcgtcacaacatgacattccactatcctcttttccccgccaaaaaaaaaaaacatgacattgccactaaaaacaacccataaaaggaaccaaacatctataggtagcgacctacaaaggatggcagtagaaatttgcagaaacttatagctaacaaagaactattatactgatggggagtggatatagcattttttttaacattattgtgttgatatatatagacttggtttgattttgttttgcccgtataatgaaattttcttgtatgactccccagtacacgaacaaacaagaacttcgatatgaagtgacaattttactccaagatatcattgatattctggtccaagatatgcttgtagatgctcaaaggtaagaatatatttaatcatatctttctctcatttttttttttttggtaaccacaacaatgacctcttctttcaacagtgtattaggtctgattaattcttctgaaacactgatctcggatgatgatggaacctttgagtactacaaaccagagctctttgcatctatcagctcaatatcgaacatacgttttccatttcctgagaatggcccactaaaagagcaggtttgggcccacctttgattatttacagacagattacgtattcatagttgatagtgcctccattaatgatgagataatgtggtatattcaggtgaaacgcctctaccttctgcttaatactaaagaaaaggtcgtggaagtaccgtcaaatttagaggctcggcgacgcatttcattttttgccacgtctctttttatggatatgccatctgctccgaaagtcagcagtatgctgtcatttaggtaatatctgtactattaaaaactttctcgaacttatttcagtctgttttgattaatatcgatttataaagcctttccatttaaggcagcctatgtagcatatcacccattgctctctcacacaaattatatctagtactctaggcaccttatgtctaatggtcatggataacctttcaaaatacctcagcaatttagcaaaattgtagcttttttatatataactacatgacaccccgcgttttgctgcggaaaatatagataaatattatgtaaaatgttgtagaaatagggataatttaatgttgaaatattgtggaaatgatataaggaataatgatttagcatgcttgtatgttataatttgtagatgtagtatagttgcattttaagttttagtatgtactaataattgtcatgcttgcatgctaaccttttggtgtttagtgggtcgatgtgacatgcttaagcatgttaactaataattcctatgtttgcatgttgagctttaggcgcttagtgagttgtaactttatagaaggtatagacatcgcacaactagaccttttctaataaactactccatgcaacatccacagaaaccatcatgattctcatgtgcactaacatgatgcctattatactaattttacacgttaatgagctggtacagcatatttcaagttgtttcatggcattgggttgactccataaaaatcacaatacctagtgttagcactcctcaatcatcatgaaattgaagagattaaggccaacacagactgtattatgtctattccgacaattcaaatgaggtgcaaaccctagtagcttgggttaggtaggaatgccacaggtacatccccttcctcatgccgcctaatccattttcgtcaaaggtgttgtctggttgactgagctttagtgatctgcctaatcactgcataggtagccacacctaataggcggtggctggccatctgggtggtgcctgaggccaacttttccattgatataaacgtcatcctgtcaattaactctttttggagattcatacaccatcacaattacaacaaaatcagatttaagcaagtataatatacttctgatagcaccctaacatcaggacactttatccagcataataactccatatttcaacgaagaggtaaagttttcagaggacgaacttcattcagatcaagacgaggcatccatcctttcctacatgcaaaagatatatccaggtcatttgtcttccatagctagatcccttcactattattacaattgcttgcattgatttcattttgttactgagatctggtattcttttccataaaacatggtcatgtttctcattgttttagatgaatggagaaactttttggaacggcttggtccaaaggtcacacaagaagaaatcagatactgggcttctttccatggtcaaacattaagccgaactggtaatctacagaaatattatcatttattgtaaactcgtcatctaagtccatgtctccaagctgtctgactctttctgtcatgcactctagtccgaggaatgatgtattacagaaaagcactgagactacaggctttcttagacaggacaaatgaccaaggtgcatatagaattttctgcttcattatgaaatttagaaatagcttcccatagctggttgtatttcaaaccaactagatcagaaatcagaatactatcagataacagttctgatgatttcatacctgtcaccttcatacttctttggtttaattttttgagcaaaaacttgcacagaattatgcaaaggacctgcggcgaatgggcgacaaactaagaacatgcaccaatcattatcaactgaactagacgcacttgctgatatgaaattttcgtacgtcatctcatgtcagaagtttggggaacagaaatctagtggtaatcctcatgctcaagacattatcgatctaatgacaaggtataatttgagaaatagaaacctgcaaattaatgatttatcacctgaataatgctgataattgccacttctgatgtgcccaataaaggtatccagctctacgtgtcgcctacattgaagagaaggagatcatagtagataataggcctcataaggtttattcatcagttttaataaaagcagaaaacaatttagaccaggtaatgatcttaacttatgatttagcgagtacagaattccattctttctttagatctaagcttgtttatatatcttttcaacatttattatttatcagtgtgactgtaccttttaaattataatgtgtatttccattaatattctctctccagcttctcggataattgtgcttgttaattatttgcataggaaatttaccgtataaagctgcctggtccaccccttattggagaagggaagcctgaaaatcaaaatcacgctattatattcacccgtggagaagctctacaaacaatcgatatgaaccaagtaactaattggacattcttctatattttttgtttctttataaagactgctcataaagactatcgtgctatcaggacaactatctggaagaagcttataagatgagaaacgtgcttcaagaatttgttaggcatcctaggggcaaagctccaactatccttgggcttagagagcacatcttcactggaaggtctgtattatttgcaacatgtctttcaaacttgtttctgtctttatatttaaagagtattttctctatgtgtgtgcagtgtttcttcacttgctggattcatgtcatatcaagaaaccagctttgttacaattggacaaagatttcttgctgaccccctcaggtgaaagcattctctttgttcttgatctaaatagtttttgcagtgatggcacaaactaactttttatatttgagtttctgatttgtataaagttcatgttacatgtggcatgtgttagatatcgatttccttttacatcataagtattcatactccgatagaacttttatgtaagaggcctatctttctttttcaacaattagccagaagctctagcgttcaataaaggatagcaccaaaaatggtcattaaactgcctccctgttaccagcccattgattcctagagagcataatatataaaagcactctgttatttaaaaggtcactcccatggctgcagggtgcggtttcattatggtcatccagacatttttgatcggatgtttcatttgacaagaggtggcataagcaaagcgtctaaaactattaacttaagtgaggacgtgtttgctggtaagttgaaccttttcttctgttgaaacaaaatctttctattaaattgatatgcagttgcagctttaacatttattctgcagggtataattccatattgcgccgtggacatataacttataatgagtacattcaagttggcaaagggcgtgatgttggtcttaatcagatatcaaaatttgaagctaaagttgcaaatgggaatagtgaacaaactcttagccgtgatatccatcggctagggcgacgctttgattttttcaggatgctctcttgttatttcacaacagtgggattttacttcaatagtctagtatgatctctctccttccgcacaccaattatcaggactacaagtactttttactatgagatgtgtactaatggtcctttcttcagcaaagcttagagtagactaacaacaaataagtagaaaaaattgtgcaagaattataaaattacagtaaacatgaatctgttattttgtgtaaccttttcattgtcacgtagcacgtctttatttatctagaggtccattcaaatcttacttacagtaaaagaagttaaagggtcatcttgttcagcaatcccatctagctgctctttttaaagctctctggttcaatcggctgtctttgccagctcaaaattggtttgagaatggcctagtcatatagccagactggactaagtttttttttttttttttgaatttatggactaagctttggttccctcctttttctgagattagctgctttagtattctgctctaatattcctagtccttttctctaagcaggcacatcatcagctgataacaaccacaatcatactgtttctcatttttttgatattttttctggctatctcgttgggtgacacatattttttggttgggtttgcctcctcgcatgggtgagtgagactgctgatacgcggttctccggttgaactgctgttcatcggtgccatccaccgggtgtgggtggtttggctgtgcatgcaggccaagcatgcccctccgtattttttcaataaacattcaatactctaggaaatagcagagcagcctctgacctctttcaccttgttatagttattatgaaaaaacatctctatacatctgattttgcaccgatccttgaaccattaataggtactatgaacatggccatcctttttattttgaggaatgaattgggttgatccatcccgtgccattcaatatggccacaatgacagtagagctgccacagaaatcagtggatggtcaattatggacaactccatcctaatattaagactatctttcaaacaggtcattgggaacaactagaaggatgaaacctgaagtttccacggttaccttttgagaatcttattctagagatattgaatcattaacaatattaccttttacacttccatgtttaaatttcatcgaaaacatattcgttcgatgaaattttgaatgtttaagggtttgacaacatttatatgcttcttaataatcatgatccttgcctcctttgtgtcttatttgaatacacacaggggcactgagtctaattgtttcaattggtccatgtgtttgcagatatcagttgtaggcgtttatgttttcctctatggacaattgtatttggttcttagcggcctacagagagctctgttaattgaagctgagactcagaatatgaagtccttagaaactgccctggtatctcagtcttttctccagctgggtctgcttacaggattacctatggtgatggagctaggtctggaaaaaggtttccgagtagctttgagtgactttatcctcatgcaactgcagttggcttcagttttcttcacattctctcttggaacaaaagctcactattatggacgtactattcttcacggtggtgcaaaataccgaccaacagggcgcaaatttgtggcattccatgcaagctttacagaaaactaccagttatactcccgaagtcattttgtcaaaggatttgaattggtcttccttctgataatttaccatatttttagaagatcgtatgtgagcactgtggtacatgtgatgatcacatactcaacgtggtttatggcagtgacttggctgtttgcaccttttctttttaacccagctggttttgcttggcgtaagattgttgaggattgggcagactggacaatatggatgaggaaccaagggggcataggagtgcaaccagaaaagagctgggaatcatggtggaatgctgagaatgcacatcttcgtcactcagtactgagttctaggattcttgaagtgttgctctccttgcgcttcttcatgtatcaatacggacttgtctatcatctcaagatatctcaagacaacaaaaatttcctagtctacttgctttcttgggttgttattattgccattgttgggttagttaaggtgaacgcttaatctcaaaaatttcgatgcattgttgtttcatgcaattgtcttcattcatcctcatgtccatttattggaaaattctaatggttgtgtaatactctatgcagcttgttaattgtgctagccgtcggttgagctcaaagcaccagcttgtcttcaggcttatcaaattgttaatattcctctcagtgatgacctccttaatccttctctcttgcctctgccaactatccatcatggatttgatcatctgttgcctcgctttcataccaactggttggggcctcctccttgtaagtgtcaacagtatggtaaccatttatcccaagattatttctcgtctctgtcaccctaatggtttcttgctggtgcagatcgttcaagttttgaggccaaaaattgaatactatgccatatgggagcctattcaggttattgctcatgcttacgactacggaatgggttcactgctattttttccgatcgctgcattagcatggatgcctgttatctccgccatccaaaccagggttcttttcaacagggcattttctaggcagttgcagatccaaccttttattgcagggaaaaccaaacggaggtaataactgatggctttgttaattggagttgtgaatacgatccattggttggtcaggatgataataattctctgtatcctggtgtacatattatacggtatacagtgtgatccatcattctttaattagcccatacgagtttgacggatttagcatctcagtttttatgtagagtttaaatctagacttagttttatcttcacataccatttcttactttctgtaacacagaaatgccgtgctattgctcttggacgaaagtcatgttagattatacaacatcacggatatttgctctcaaattactgaaatacacctgtgattttattggggatttcagcatcgattcttctgtttctcagagcagctttttcttgttatgcttgcttaaagtttatttttctatgctatgtatatcacttgggagtttacatgaagatatattcgcgtagcattctcatttgttttttgtgcctgcaagctatcaaaggcatgctttgttccaggagagcatctcttgagttgagtgtgaatgggcctatcaaaacattttttttttattcgtttgtcttgcgatctgcagcacttaacagaagatttacaaatgaatttgaaaacgctttaagtcacaataaatcaggataaccaaaacattgtactacctttgttttgtttattgtgccacagtctgaaagaactgtaatgcagcaacagtgtctggcctaatacggtagtatagcatagtataactgaagttggcccacagaccaacagattccagttgattttgtaattgaagcctctagcgccgggtctgaattctgcagctgcagaacttgaaagaaacaaatcaaagagccactgcatcatgcttcgcttctccaactacatgtctacatgcctctgacaccaacataatctgcgagagagatgtcgatttaattaacaccacaaattaattaattaaaacagggaccagcagcaatgcataagcatgtgctacgtaccctggctgcccaaaagaatcacgttcgcgagtggcactagactagtacgtcccagcactgcacatgagtaaacatttcaaaaaaacaaagaattgtattcaggagctaggacagccgtaggacagcatgcaaagacagcaagagacgtaagtacgcgcgttacgaacacggcaaggatcgatggaaatgcaaatgtgcatatggcagaataatcttaccattttgtatatacatttacatgtgcacttgtactactacagaaatggcagagatatgatgcagttagaatgcaacttgcaaagatgaactaaacatatacggtggaggggtaaaaaatttctcaaaccacagctcaactaatgtaattttcatatattagtctttattcttctaattttttaaaaaaatttgaagtgttattcccatgggtatttagggtcaggaatagggatgccctactcctggttccgcccctgcatatactcatttcctcggttttaaaatataagtatttttcagtatgttttcaaaatgtattcgaatggagggatgttcagatatattttaacaaaagaatactcagaaaaatacttacattctagtagtagctagctagctagtagatgtaaataagcaagttgggaagtagatcggtcgatgagtgtacagtaggcatgcaaaaatatgcacgcgtatttgcgatgctttgctagctgggtggagggagcaaaggagaggccgttgcatgtgacatgcatgtggaaatgatcgaccctgttcgttcgttcgtgagaatgtcctacggccacccacgcacatgcttgcatgctccattgggccgcatcgcattatttccccactagctagctagctaccttgtttccttgcccttcctcaccctatatgcccatgccaatatgtcattgtagataggaaatcgtagaatctgaaaagtagctaatgagtactctctccatctcaaaataaatttattttttttatttttcctcacatatcaatacaaaatcaaaaagattataatatctgcattttatcaaattgcaatacaatatattattctttactttatctaacccgttgtgttttatatcaacatttacaaaattccgatgcaaaatgattatttaaaaataaatttatttcgggacaaatggaagggaaaaaaattattttagaacgaagggagtacaaagttagtaagaatgtaaagaatttactatctctgtcttaaaatatactaactattcctacctttctgttttaaaatttacactaaaaagttaaccatatacattggtacagaggtagtagataataataatcccattttcttactagtcatttttggattccattactcatttttggattccattgctagtttgtgacttagtgttagaatcgggattgtctgtgaaatagctagttaattagctgaagatttcggagtagctgcaagtaaaagtgaatgtcagaaacttcccaaacagagtacgtacgtcatatatacttaatctctctctctaactggtgtgtcaatatatattattgcagctggggggaataattgatgattagaggggagcattagctagagggtggactttgatggagagtcagaataatttaaccagcaagcatgttttcttgctaaccacttcacaggcagcatcatccacactgcacgttgagcgtatatgcaacgctggctagctagcttatttgctctctcaaagcctctcaccgagtcacgttcatgtgccgtcggctatgctagctttatatcattatatgtttttccatcctgatatataatataatataaagtatataaattaattaactgcagccagacagcgcatgacagtagggagcaaaataaagctaggatttgcatgcaggcccaccgtttcaaccctctcgatatatatgatcttggcttcgccgggtagcatctctaataatataatattattataattatatcttgctctgtgttaattaagttacttataatatacttactccgtttcataatataagttattctagcattgtccacattcatatagatgttaatgaatatatacatatgcatatgtctagattcattaacatctataaatatggacaatgctataatgacttacattattaaacggagggagtaaatgatttgccaacaattgtttttggcatcgctaaaaagattatcttgcttttgccgtgcgaattgtctttaatttccactgtacaatagaacattcattttcaccttggtggcaaaaaaaaaacgaaatctccaaaatatataggacaaagaacaaatagaacattccatgttccaatcaaatttacatttttaattctctacgcctatacagttaggacgacaactaactgtatacaatcatgagttgatatacatagaggtacaacgctcttaagtaattacttatatattgatctgtctactaattaactaattattaagaatactcctagtaaatttgaccatgagatggagatatataatccatctatttcgccccaaaaatgggctagcaatgaggaccaaatatatgatgattttacgcctttttaaggatatatagaaatgacaattgaagaagggtacttttatttttccaagatggatcactaaaattatttgttacaacaagtcttacatagtaattaatataactgaatgagtatacaaacaattagctaattcccaaaattgcaaagcatgagtcattaaatccgacaatttcttatataggtgtttttagaaaataaaatcatttatagtttttgatgaaaatttgtacatgtacacataggttcccctccctaatatattataggaggaggcaggcatttgtcgagtgggaaagagagcgggagagagagaaagagatgtggataaggataagttgatggggtgcatgggaagagggttggataaggtcgatcagtctaatcacggtttttaaattaatcggtacctataattcccactcgacaaacgcctgcctcctcctcctcctcctcttcgtccgcctcccctcccctcccctccggacacggttggtgtgcggtttctccttgggttggtgggaagcatggcgatgttgcggcaccggatccgacggcgacggcttctcccacgggcagatctgatggcagcggcttctctcgtgggtggatccggcggtggcggcgtctctcctctctccaaccccaccaccacagcccctccttgtcccctctccaccactgtggcgtccatcctggcccctcgacggtggcgactcttgtgaatttgattgggggaatcgatggtggcctagatgtgatgggggagcggctcgccaacgcatcgagcaagcttttttttttttgcattcgtgcaacattaaaggtattggttcctaaatcaatacctttgattcctcctgtgaggtgtcggttggaaaatccagcaccatgtggggtttccacggtacctattacaatttgtatagtagtgatttcaggcgtctaaatatttgcaaatttttagtgacctaaaataatacaactacatcgaatcttacggcaccaaatgtacaccatactccctccgtcccgtaaaaaaacaacctagtaccggatgcgataaatcgtagtactacgaatctggatggacatatgtcgaaatttgtagtactagaatatgtcacgttcggttttagattcgttttttatgggacggagggagtaagttataaactctaatatgtatgagatagtatagaactaagaaaaatgtctgaattaattattcccttaacttttgcagtagttcatttaccacttcaactcttatgccaaacattttgtcctaggtttctcaaactgaatgaattactcctacttaatccggatcggtttttcgtatctagcttcttaaaatatcagccttttcaaatctcagctccctagctaaacaagaactaaatatatatggtgggggggagggcaatagtactatgctgtcgaaaattcactcaagttaaattcaagtcaatgcaattttgcaaacaagctaggggaccacaccttattattattattattattattattattattattattattattattattattattattattattattattattattattattattttggagaactaccacaccttaatttgaagccctaattgaagccaacgcgagaaaaggcgcctcatggattcggaatgacatgtattttcagtaacaccagcaaagctaggatatcattatctacgatctccagttcgtagttttcatccttgcaagaatctggatctggaaagcaaacagatgctcgatttgacgtccattgcaatggcatggttagtgtgccaaattttttttaagtatacggacacacatttaaagtattaaacatagactactaataaaacaaattacagattccgtgtgtaaactgcgagacgaatttattaagcctaattaatccgttattagcaaatgtttactgtagcatcacattgtcacatcatgacataattaggatcaaaagattcgtctcacgatttacatgcaaactgtgtaattagtttttttcttctatatttaataatctatacatatgtctaaatatttaatgtgataaaaaagttaaaagtttgatgtaaaaattttgaatctaaccacggccgaggtatccattgcatatagtgacatgtctctcactgtctctcacacacacatactgacacactgacagtggggcccactgaatgcagcacgtggtttccgaggccggccctgatgatgaaccaaccgccagctgaagcctcagctccagaagaggagcagtacgtgcagggataacgtactctctctcactcaccggcctctgcagccactccatgcttaaccgcaacaactaccccctctcttccaaaatacgtatactccatctatatcaaaataaactaaatttagcataggatatgaaatattctaatactttatttaaatttatagtgcgatgtatatattacatattatgtttgtttactttaaaataaatatagtaattagatatatgtctatttataatagtatgatgtgtcttatccgattttaaattactatattttgagacttatagtagtactcccttggtccgaaaaaggataacttctgatgatgaattgtttgtctaatttatctctaaattttatttttttaaagaggatgtaatggagatcgagaattgcatatactgctcatctactgcttcatctgtatgcatgcactgcacaatagtactagtactactagtagtagtagcactgtctctcacttagctgttgctagctgtcccctttccccccatcatgtgacttccatccttgttcctagctgcatgcaataccttttcccattaaaaaaaaatagtactaacaaactcttcttctctaactaactatgtgactaattacaggttaaaccatctcatctcttatatcacccaaagcccttccacatgccatcaattatcacacattgcaacttacaccttaacagcttgcaacaggtaataatactgtgtgtagttagtttgcttagcaaagttggtgatgacttaaaaaaaaagaatcagctagacatggattaagctttttgtgtatgagtgtattgtcatgcatgcatggtagtatactatggtagtagtcctaattactaactaccaaatctcttggatcttgatacacttgttgcatgcatggctctaatcacatgcatgatgctaattaatgctagctagctttatatgatagcttgcactcacacacacacacacacaaatgcattgcatatatatgcccccacaattgcatacttgcatgtgccatctatctttccacaatatatactcaccttcaccacctatactcaccttacacattctctctttgctatctctacttgcacatgtcatacatctagacaaggacactagcttagctatagctagctactagcctactactagtagtagcctagctaggaggaggaggagctaggatggcgcagttgccgccgagggcgccgagcgcggcggcggcggcggggcaggagtggtcggcgatggcggcggcgggggagtttcttgggttcgcggcggcgaggaggggggcgcacaggaggtcggcgagcgactcggcggcgttcctgatggaggcggcggtgccgatggacgacgtcatcgtcggcgtcggcggcggcggcgagttcgaccggctcgacgacgaacagctcatgtccatgttctccgacgtcgaggcgccggcggtgtccgacggcggcggcgagagggggccggccggggaggcgcacctcatggacatgggtgacggggacgacgggatgggggcgacctcgccggccggcgctggcgcaatggcggcggcggcggccgccgccgccgcggacggcattgccgaccccaagagagtcaagaggttagtggcaattaattttgcagtaaaaatattctgtttttctatttaccataaaaaagagtaatatttatccataaacaatgttaagagtaacagtcatgtcaaaacaaaatttcgcacaattccaagctttgcacgatgtaattttcggagacaaatgcacaacatttgagtgaatttttcaggtctaaaattcaagagaattgtgcataacaaaaagacttgaatatacatgttcttccatgtcaacaatctgctttactgaaacatgtacttgcccgtaattaactgtatactaaatgccatgtgcatgaaccatttgaaattcaccaaagaccgtgaattcgagtgacaaatcgtgttgaatttagctgtaattctggcatgctttgcttctgttttcaggattttggcaaacaggcagtcggcgcagcggtcaagggtgagaaagttgcagtacatctctgagcttgagcgcagcgtcaccactctccaggtgatccatcaattcaactctctctcaaaaaaaaacaaaaagaaagggaaagaaaacgactgcaactgagcaaaattctctcaaaaatgcatttgtgatctgaaattctgaatgtttggctgattgttactgcagatggaggtgtcagcactgtcacctcgtgtggccttccttgatcatcagcggtcgctgctcaccgtcggcaacagccatctcaagcaaagaatcgccgccctcgcacaagacaagatcttcaaagatggtaccaaatctccctatccatcttttgcatagaatttttacaattgcagtaaccgcaatcgtaaatgttctgagctactcttttcaaacaaacttgcgaaacttgtttatgattgctttctaactagccatgaggatcctgtaaacatttcagtaaactcattcccaaaaattcatgtgcaatgcagctcaccaggaggctctgaagaaggagattgagcggctacgccaagtgtaccaccagcagcagatcaaggccaccggaggcgccgacatcgccacggcggcctcaatgcaggccaagcatgagctgctggcgtgcgagggagcggcgatgcgatagcggaaggccaccggtgaccggtgaccgtcggccggtggggattttttttttttttttttggcaatttgccatgtgtaagatgacacagcttggtcagtagttttgtgcagcttgttaaaaagttggttgattttgttgtttctttataatgttatgtttcgttttgctcatcctagcaaaaaaattgtgctgggatgggagaattgatgtggatgtattgtttggaccccaattacatttgtccagaaaaggtggttgctttcagcagttttgtgtattcttgcaaaatgcagctaatctagtttatgctaagttccgataaatgaaatggaaggaaactggtgacaactctgagatagcaatgaacttatctgatgttttgtacaagtttacagtgtataacaaatatcagataaatgaaatagaaggacaaatggttgctggcacaagagcagaaacacccaaacacaaattcagctttctttatctcaaatttagctgattcaactggatccttcccccctccccctcgcatacaaactatataatcatagcacagagaattaagagccgtaaaaatttcaattgaaacacaaaccgtgttagaacacagaaaataataattagaagcaaactcattgagtactcaactatgtgaccaacataaacatggatggctaacagccatacaaactgacagatacaaaagttgtgttgggaaatgattataaaggctaccacaaaaatttaaagaatttcaacagactgatttatatgttaggttaagtgtgattgatgcattcatgtgacattctactctgggatcatctgttcattgtctgcatcaccctcttgttctatttgaggttgctttggagctgaactggctccaggagcttgcttcttcttgatgccactgacaatatcatcgatcctcaggagcatgcaggcagcctcaatagctgtcttgaatgtctgcgccttgacactgtacgagtcccagatctgaaaaggatagataatgaggtttcaagatgaatgcaaacacgcaaaagcacaagcacgagggggggagagagaccttccgctctttcatatccacaatatcaccactgcttccatcaatgccaacccaagcattttcaccatttgcatgctgcaattatttggcatgttagtgaaaacaaatccaagataaagcacaggaaactgtaaaacaatatattattcaactaaaaaatatcatgatatacatgttaggcacaaaactgaagacaacttgttgaattaatgaagaatcagattttacctttccctgaagttgtgtcattgtcctaataacgttcaggccacaattctgtaaaagagttcttggaattgcctcaaatgctaatgcggcagcttcatagggccactggtacacagacagcaaagttgacttacatcagttgagttaatgatcacatagataattataccaagctaagttatacatgacctatatcatacacatcatcgacagctctatttgagaaagaatactactaaaagtattcatgcacatacaggaagaggttcgctatctgcaggtttcatgcattggctatctgaaatctgaatcataccttctctacaccttcaactgaagaactcttttgtttcaatgttgcagatacagttaattcagtagcaccacctccaggtagcagtttagggtttttccaaatgttccttgccatagacatagcatcctacaaaccagaaagtttagaagatatatttccactatagaatataacagcataacaggggaaaacataagcgcacctgcaagttcctctcaacctcattcaagacatccttgcttgctcccctcaacaaaacagtacatgctttgggatctttgcagtcaacaatgaaggcaaagaactcatcaccaaacttcttgacctcaaagaggccagctcctgttcctacatcagattcttgaagttcctctggcctattcactataactgctccacaagcctttgcgatcctgttgttgtccgtcttcctgagccttcgaattgcacttacaccagcctttcctaaataatggactgctaggtcactcaaccctttctctgttataaccaaatcaggcttgaatttcagaatctgtgcacacaggttctctatatattcctcttccatctgtagcatcacctgcctgcaataagccattaaaccacagtaaaatatatgcacagaagaatttgaattgcctgtctattttgacttaaaatatgcattcagatcccttaccaatcttcttctttcatcaactcagcattggtctggttttctcctttcttgtattcaagagggcaatccaggagaatgatgcgtgggttaactatttttcttctcattttcccaggagcaacaacatctttattgatcataactcctttaagaaccttggaatcttccagctggcctccaggaaccttctctactttgatgtacttcttgatatcaacttcacgaatgccttgacccaggtcaacaccagctgttgtggtagcatcgatagcaagatcctgaagcaagaaattttattagcagctctaaaaaagagatactggaagaaaatggagttgatttcatttaaagaaaggtacttaccgcaataaggtcaccaaactgaccagtaaattttgtaccgatggaactcttcaccagaccaagcattgcaacacctaaattatgaattatgaaaagcatcactaatatgaatctccaagagaacttcaagaacagatgatgattcaaataaatatttgatatgctgaacttagtctacttacggtcgtccacgtcaacaggaatagcaatcttatcaagaacagatagagcatcgtcaagagctttggtgtatgctgcaaaaaataaaagaaaaaaaaagaattctatgacatatagaaggtgttgatttcagaggcatgtttctaattcttcagaaaattacctctacaaataacggtgggatggtagttcttgtcgatgaatgcttgcgcaacatggagcatttcaccagctaaagaatacatacgtgtattagaagggcataaatcaaatgaaatttgctcatgcagacaactgcttaagtacagcaacaaaacagatcaagcatacatatattcttcggcccttctaaacagggaaggtcaacttgaaatgagtctttattcagatcatactaatttgatatgatttgtgaacttctctaatattatctttgcagcatatatgttttaatattgataaaatggtcagctaatccaggatgacgcttgtgcagtttatgtgggtcaatctgtcagataaccctaaatgattcatttcatgaaattcaaatgtaaatacaagatgttatgctattctgtcatatttgaagatgcacttaaacccctagtgggttttggtgattaatgacaaggtggttaaaggggactaacgtgtttatcaagtttattcataggagtttagccccaaaacaagttgtgatggctaagaatgcaaggagaccctccaatttgaatgttcctaagtgcgaaaaacatcgaaggtgattagactaggtttttctctttcgaaattgagtttaggaaaaaccgtactattatgaggggtttcaagtgtggttccagggtatacaaagtgctcttagtcatttccatgagtctaaaggtttttggaacttttttttggaaatgattttccccgggacagagaggcctacccggaggttctggccggaacctccggacaccaaagtttattttctccacgggacagagagggctacccgaaggttctggccagaacttccgggcaccgaagtttagctagttttttcctaagtgctgcccggaagttcctagcacttttgcccggaacctcctggcaggtttccagttcaatcttgtgagtaacggctagatgacgtcacctagccgttatatatatggatttcgtccccaggtcaccctttggccattccacttcagttctttcatgttctagggttttctagccactcccaagcttcctttgcttcctccactcaaatctacagcctatcttgtgagattgagagattagattagagtgtaggagtgttttggagatggcttgaagattatgtttgtttgagcactttggatactttgtgggctgtcacttgggcttattactcttggagatcttctcctagaaagttaggtgtcgcccgtgagcttccaaagatcttgtggatgtcccgggaaagtttgtgaaggttttcctcacctccgcaaggaaacgaggtaagtgagtaaagattcttgtgctgagttttcagaggttgtcctaggtagagcaacttgcacttgtggtcttttctagaaggaattgtgagttggatcttggtggtcactcaattctagaaaatgacctagaagtgttgagttgaaagctgtggacttcttctgggatctttgcataagtgaggcaaggggttaatcgagacccggctctttgagcacctcaacggagagtaggatctgtgtgatctgaacttcgggaaaaaatcgcctttgtctctcttgtgcatgttctgtgtttgaatctgctggtatcttgtgatttacatcttgtgcaaccttgtgcctgattgtctatagctaagacctgttttacttccccaaattttgattttctctgttgcccggaagttcctggctcaagaactccggaagttccaggctgctcatctctgccaggaagttccggtgttcttcaccaggaggttctgggccctgttaatttaaccgctgcgattgttgagaaaatttcaggaaagcctattcacccccccctctaggctacatctctgcgcgttcaattggtatcagagcaaggtgctcttgattcaagcttcaccgctttgagcgatccacgatgtcggacttagggggaaaggacggggaaattagaaatgaagatggagcgagcagcaagggaactccatctcccaagggagccactataccttttgattacagcaaacttaccattccctctcacaacttcgtctccatgccttctgggcgtgctcctcaatttgatgggacacattacgccgcttggaagcacaagatgaagttgcatctaatctctttgcatccaagtatttggaaagtcgtgtgtacaggtattgacgtacctcatgaggacatggagctcacttcggagcaagaacaactcatccactgcaatgctcaagcttccaatgcaattctctccgccttgagtccggaggaattcaacaaggttgacggactagaggaagccaaggagatatgggatactttgcaattggctcatgagggatcacccgccgttcgtgaggcaaagattgaattattggaaggaaggctaggaagatttgtgatggatgacaaggagacaccacaagagatgtatgacaggatgatgatccttgtcaacaagattaaaggacttgggagaagatttgtgatggatgacaaggagacaccacaagagatgtatgacaggatgatgatccttgtcaacaagattaaaggacttgggagtgaggacatgacaaatcactttgttgtcaagagacttctccgtgcttttggtccaagaaatcccactcttgtttcaatgatacgggaaaggaaagacttcaagagactcaccccaagtgacattcttggaagaattgtgtctcatgagatgcaagaagaggaagctcgtgaagtgagacaaatggtgaagaatgccgccatgatcaaaaatcaagaagttgctttgaaggcaaaacaagaagaagagtcaagtggtgaagaaagtgaagatgaagaaatggcttttattgtcaagagattcaagcactttcttcgcaagagtggctatggcaaagggaggaaggatgatgacaagggaaagaggcaatcaaagagagcgtgcttcaattgtggcgaatttggccatttcattgccgattgtcccaagtcaaatgaagctaaggctaagggaggcaagaagaagccggaacgtgctcatgtggcggaggcacacatggcggaagtgtggtactccggagatgaagaagatcccgaagtcaagcccaagcccaagtcaaaagacaaggttgaaggagaaggtggtgttgctaccgtcgccttcaagtcatcctcttcaagcaaggagcatctcttcaacaacttgagtgatgatgacgacgacgattcctaccactactcttgcttcatggcccaaggccgcaaggtgatgactcaaaagccctctcacacttctcttgatgttgagtctagtgatgaggaaagtgataatgaattagatgatgtgcttaagagctttagcaaacccgctatgcaacatttggctaagttaatgagagctttggatagtaaagaacaattactcgaaaggcaagaagaattgcttattcttgagaagaaaagaaaccttgccttagaggagagcttagctaaagaatgtgctaaaaatgaacaactagctaatgagcttaattttgctaatggttctttagctagccttagagatgccaatgagactcttcaagagaaatttgcttgtttagacaaaagtcataaagatcttgaagttcaatttgacactctttggaatagtacctctcaaccaaatgtggtttctaattcctctaacccttctactagcaatggttgtgctaggtgttacaatattgatttgaactcttatgctactaatattgatgctatgcaagctcttaagaaagagaatgaaaggttggacacattggtgaaatatggatgcatgaagacataccattcaaaagatgccctttacaagactatcaccgctcatcctaacaaggatggacacgggctcaggttttcgggtggaagtcctgtgtctaagcgtgtgatggtaaatggaaaagaatgcttgatgtttgtgagagaaggaaaagcaccacaagcaagtgaggtgactaatcttgtgagcagccagggactcggaacatctggacaaaccggccaaaacctctgggtgggagtttctgtctctcaaaaattcccaccaggaagttccggccagtttgccgggaagttccgggccaatggccgtgcacaagacatgaccggaagttccaggcataatgccaggaggttccggccagatggtctttactatgattcatatgtaatttccaaaaattcagagggcaaagtggttgtttattttaatgggaattacaatgatgaatatcgcacttgtgtgtgggtgccaaaggctttggtaactaacatcaagggacccaaacttagacaagtttgggttcctaaatcccaagcttgatttcttttgtagacatactcctccggtggtttaagttgggttgtggacagtggttgcaccaatcatatgactggagagaggagtatgtttacaagtcttgatgaggagaacggaactcgtgagaatattgtgtttggagatgatggtaaaggaaaggtaatgggtctaggtaaaattgccatctccaataatcaatctctctccaatgttcttcttgtcaattcattaagctacaatttattatccgtttctcaattatgtaagttgggttacaattgcttgtttaccgatgaggatgtgaccgtctttagaagggatgactcctccgtagcattcaaaggcaagttaaagggtgatctctatcttgtcgatttcaatgtggatagagtgaatccggaagcttgtttgattgctaaatcctccatgggttggctatggcatcgtagactagcccatgttggaatgcggaatttggcaactcttctaaagggggaacacatcctcgggctcactaatgtcacatttgagaaagatcgtgtgtgtagtgcttgccaagccgggaaacaagttgggaatccacatcctatcaagaacatcatgactacaacacgccctcttgagcttctacatatggatttattcgggcccgtggcctacataagtattggaggtaacaagtatggttttgtcattgttgatgatttttcccgcttcacttgggtgtattttctccataacaagagtgaggctcaagatgtcttcaagcgcttcgccaagcaagcccaaaacctctatgatctcaccatcaagagggtgcgaagcgacaatggaggagaattcaggaacactcaagtggaggaattccttgatgaagtgggaatcaagcatgagttttccaccccatatgatcctcctcaaaatggcattgttgagaggaagaaccgaactcttattgaagccgcaagatcaatgcttgatgagtacaagacttcggatattttttgggcagaggccgtgagtaccgcatgtcatgccatcaaccgcttgtacctccacaagatcttaaagaaaacttcatatgagctcttgagtggtaagaaacctaatgtttcatattttcgtgtctttgggagcaaatgctttattttgagtaagaggcctcgctcatctaagttctcacctaaggtggatgagggattcttacttggctatgaatcaaatgcacatgcctatcgtgtcttcaacaaaacctccggtagtgttgaagtcactagggatgtgacatttgatgaatctaatggctcccaaggagagcaagttgttgtacatgttgtaggtgatatggatccaagtcaagctataggtactaaggctattggagacatacgaccagtcgagacgcaggatgaccaagaagacagggatcaaccttcgtcatcgacatccaatagccctacattgagtcaagtgtcagtcgacccgaaagttccgggaccagatggtcggaacctccagacctctccaggccaggaagttccgggtccatctgccaagaagttccgggcagaggacagtcaaggcgtgcctacggcacaagtggatgggattgatgccgagggcactgtagagcatcctgatcaggctcaggtcccctcggtgcaccatccaagaatacatcactgtccaaagagatcatcccgtcgacaacatacttggtgacataagaaagggggtaactactcgttctcgtgtcgctagcttttgtcaacactattcgtttgtctcttctttggaaccaaccagggttgaagatgcacttggtgatccagattgggtgatggctatgcaagaggaattgaataacttcactcgcaatcaagtatggatgttggtggagagacccaaccaaaatgtcatcggcactaagtggatctttcgcaacaagcaagatgaacatggagtggttctaaggaacaaagcccgattgcgcaagggttcacccaagtcgagggtctcgattttggtgaaaccttcgcacccgttgctcgccttgagtcaattcgaatccttttagcctatgccgctcaccataatttcaggttattccaaatggatgtcaagagtgcctttctcaatggacctatctcggagttggtctttgtggagcaaccaccggggattgaggatccaaagttgccaaaccatgtgtacaagctccacaaggcgctctacgggctcaaacaagcccctagggcttggtatgaatgtctccgagattttcttttgaaaaatggttttgaaattggaaaggcggatactactctcttcactaaaaaatttaagagtgatttattcatatgccaaatttatgtcgatgacataatatttggttctactaatgcctctttttgtgaagaatttagtagtatcatgactaaaaggttcgagatgtctatgatgggtgagttgaccttcttccttgggctacaagtgaaacaagctcaagagggcactttcatctctcaaaccaagtacgtgaaggatattctcaagaagtttgggatggaagatgccaaacccatcaagacgcccatgcctactaatggccacctagacctcgacgataatggtaaatgtgtggaccaaaaggtttatcgcttcatgataggatccttgctttacttatgtgcatctcgtcccgatatcatgcttagtgtatgcatgtgtgctcgctttcaagcagagcctaaagagtgtcatttgattgccgtcaagagaattctaagatatttagtccatactcctaatcttggcttgtggtatcctaagggttgtgactttgagcttttgggctattccgattcggattacgccgggtgtaaggttgatagaaaaagcacaaccgggacttgccaatttcttgggcggtcccttgtttcttggtcctccaagaagcaaaattccattgctttatccaccgccgaagccgaatatgtcgccgccggttcttgttgtgcccaactcctttggatgaaacaaaccctaaaagactttggctacaacttcaccaagatcccactcctatgtgacaatgagagtgccatcaaaatagccaataatcccgttcaacattctcgaaccaaacacatagatattcgccaccactttttgagagatcatgagaccaaaggagacatatgccttacccatgtgagaaccaaaacccaattagccgacattttcaccaagcctttagatgagaaaagattttgcgagcttaggagtgagctcaatatcttagattctcgcatcattaggtgatgggtgattggctaatttatagtcaaacatatgtcactaaaatgtaaattaaaaaaaatgagcttttgtgtcttgagatcacttcttgtatagaagatggtcttgataccaggaataaagctcaaccattccccttttatccaaaaacccttttgtgaaaatttttgcaaaatcctttgtgtgccttttattgcgaaaatttggtttttatttccttcttgtgatgtattgtgaccatagttatgtaatgttatttgttggctggtcatatacatcataagtcttttcatgtccatagttcctaatttcccttcgttgaattctcatcacctccttgtttttgggcctgactgccctttatctgtcaggccggaagttccgggccttcctgtccggaacctccgggtgtcggggagtattttctctcggggggagttggaaaccctagtctctctcctcatttctactccctgcccgacgccagccctagccgccgctacagtgcccctagtggcgatttccttttcaacctgtgaaaatttgattcttcttcgtggaatcaaccacattggtggctaggaggatcttcccgcgatagttctgcgatttcctctctcaaggtagcactttttgattccctctctcggttcattgtgtttttatcccgatctctaaatctgtgaacctagggagaaaaccacttggatagtcttgtttctgctaccttgtagatcaccgatctataggatttgttcacatgcactggctatttttgagaccactgttcttcatttttgccggccggaagtttcggtgttctttcacccggaacctccgggcgctgtccagccagccagccactcttgattctctctttttttttacctaactactgcactccaatttattgattcctgttgcagtaagcactatgactcgtgagaaaagacagaaagcttctcaggatgtgtccggtgatgagagtcctcctattcgttttcctcgtggtcgtttgggaaaagagaaagtggttgaaggtggcagtggcagtggcactcgtacctctcccaggtttaccaggcaatccagcaatcgcccagttcagattcgtgatgttgacagtggtcaaggtagtgatgctccttcttcaagaggtcgtgggagaggtggtggtcgcacttctggggctggaagggcctctcatgatttccctgttggatttcgtgagaatcccgttcggctctacaagactattggttttgacaccactcctattcatcacattggaagacccaagtccaactaccttcatcagcttgccaagtgcagaagggaccgtttgattgatccagagacacagcctgaggagtcacaagatccacgtttcagaactttaactcagttggattggtacaactcaatgattatggctagagacaatccagtggttgagatgaagtggattgattggacttacatgaggaagaagaacaatgaagtgttcaaccaagcaatgcaagtttgccacaacaagaatcttggagatattcttgccttggagtatgattggactgaggaggtcattgcacagttctatgcgacagcattctttggtactactaggaagggaactccttatgtaaagtggatgactgcgggtgttaggcacaagatttccatagcacagtttgctgagatattgggcttagaggatgaggatctcaataggcctaatattcatagtgaagcacccctccccatgatcaagactaagttcatgtatactaaggatgctcctaggacttgtatgggaactactcatggtttgcatccaaactacaaggtgttgtaccatctttcgttggtctttgcttccaaaggttggagatgccactgctttgccttccaaacatgctcatcttctcagtcgcatgcgctacaatcagccacttttcagtgtgatgaagttgatttggtatgagattgccaacaccattcttgagcctaagcgaggttgcatctatgctccattcattatgaagatgattgagacagtcaccggggtgttctacatcaaagatgggcgccacaatccttttcgtccttgtgttccaccttcctcttctccagtggcacctagatccatcccttctacctcagctggtccttcttctagtgccccaccgcaatcctcgagctcttctcccatcaagaaggcacttcaggcaatcttctgtatgtgtgctaagactgcaaagaatgtatgtgtgctaagactacaaagaaagtgaagaagatagaaaggcgtcagaaggaagatagaagagaggctgggaaagaagtgtcagatgattctgaagatgaggtctatgtggatccttttgaggcttatgaggcagcccgcaatgttgccggtgaaggttcatccacctatttcaatgaagagtcttcccaattagatgatgatgatgatgatgatgaggatgacactgacgcagctgctgaggatgctcccactgatgtagacaccgctgcacagtccgatgagtctcatctctccggcgataccgagattgttccctccgatggagatggagatggagatgagtgatcctcttcttcccttcatggtttcttgctttttggtgccttgatgccaaagggggagaaattgtgaattgaagggggtcatttaaatctttttgctgccttgactgttgtctggtcatttggccggaagttccgggtcttgtgatccggaggttccggcctggcagatttcccctcttttatctctctctctatggacatgtaatcatattctctattggttggatgtaatgattgttagatgcttttttatcctttatgtcagcaagttagaccatatggatgttgcattttgatgtgatgatgtgttcttttcatctttttgagtgattgccatgtcatctagtctttctatttgcatcactctttatttaagctctctcatctgcatcttatttgattaaggatagtgtgaagtttcctttgagctttccttcgtttttatgcatattgtatttcatctcattttattatatgcatatctttaaggggagcttcatacttctctcatcattccaaatttaaattctattatctttttgtgtgctttaaccatgttgtcatcaatcaccaaaaagggggagattgaagatgcacttaaacccctagtgggttttggtgattaatgacaaggtggttaaaggggactaacgtgtttatcaagtttattcacaggagtttagccccaaagcaagttgtgatggctaagaatgcaaggagaccccccaatttgaatgttcctaagtgcgaaaaacatcgaaggtgattagactaggtttttctctttcgaaattgagtttaggaaaaaccgtactgttaagaggggtttcaagtgtggttctagggtatacaaagtgatcttagtcatttccatgagtctaaaggtttttggaacttttttttggaaatgattttccccgggacagagaggcctacccggaggttctggccggaacctccggacaccaaagtttattttctccccgggacagagagggctacccggaggttctggccggaacttccgggcaccgaagtttagctagttttttcctaagtgctgcccggaagttcctagcacttttgcccggaacctcctggcaggtttccagttcaatcttgtgagtaacggctagatgacgtcacctagccgttatatatatggatttcgtccccaggtcaccctttggccattccacttcagttctttcatgttctagggttttctagccactcctaagcttcctttgcttcctccactcaaatctacagcctatcttgtaagattgagagattagattagagtgtaggagtgttttggagatggcttgaagattatgtttgtttgagcactttggataccttgtgggctgtcacttgggcttattactcttggagatcttctcctagacggttaggtgtcgcccgtgagcttccaaagatcttgtggatgtcccgggaaagtttgtgaaggttttcctcacctccgcaaggaaacgaggtaagtgagtaaagattcttgtgttgagttttcagaggttgtcctaggtagagcaacttgcacttgtggtcttttctagaaggaattgtgagttggatcttggtggtcactcaattctagaaaatgacctagaagtgttgagttgaaggctgtggacttcttctgggatctttgcataagtgaggcaaggggttaatcgagacccggctctttgagcacctcaacggagagtaggatccgtgtgatccgaacttcaggaaaaaatcgcctttgtctctcttgtgcatgatctgtgtttgaatctgctagtatcttgtgatttacatcttgtgcaaccttgtgcctgattgtctatagctaggacctgttttgcttccccaaattttgattttctctgttgcccggaagttcctggctcaaaaactccggaagttccgggctgctcatctctgccaggaagttccggtattcttcaccaggaggttccgggccctgttaatttaatcgctgcgattgttgagaaaatttcaggaaagcctattcaccccccccccctctaggctacatctctgcgcgttcaatattaaccaactggtctcttaaaataagcataagggaccaaaaacggcataccaagaacaataacagatgtcgtgccatctcctacttcttcatcctgtgtgcggcttagctcaatcatagactgcatggacaactcataaagtattaggaatacaggactgagcatcgagaatagggctaagaaaagagctcaaggtttaggagctacgtgcagtttcattgtttggcatggcatatcgttcaccaaaaaaataaaaatctttgtggtggcatatcgaccaaagatttaacatgcaagtagcataccacaatgtttaatgtgatgcccccttctaagttttaaatctgacatctagcaatatggtcgttgatctggctcctagtgactctatatgtcagccttgtctatgatattttgtgtgattcagaagaattaaccacagatgacctttttacaatgtcacaacataaagtgatcgttttgaaatttatttttcatgtggctgcatgctctgggtgaaccaagtgagcagcacaaacaatagccataagacgacttcaaggtacacataagggcgtgtgcacaaaacaagctaagcttaagatgaatttaaataacaaatgaacaaaattcagctgttttatcttcactagatctaatcaaccaggccttaatcatgcacgaccaccaaaactatgataacttaatattggagtggaccaacctttgcagctgggtgtgcaaggtctagctcccgcaatatacaattgccatcattagttacaacaatacctgcagaaccaaggaaataattcaaatatggtgaaaaatgtcctgacagttctacaaatgtagcatctatattcggagtgttttactgacatatgaatgcaaaaatctatccaccatcaactctaaataaaatgcttaatgcaccattcaaactattccttgaaacaactgtataaccatagaagttacatttaaagaacacaatccttaatgcattgtccaaataattcgatagaattattgtattaattatgattataggacaagttggatgcagataaaataaagaaggtagataagaaacccaaataagttggaaaagaatgcaaaagttggtccaaagataaatattcagcttcttttcattatgacccagaaaaggtaatgaaacataatcttcccaacatcactaggtaatttccatgaaaccaatgaagctagagttgtacaatgcacctgaaaggttctgaaacaaaaagagaaaggacacatattctatcataccatgaacagggcagttgtaaattgcaactcatacgatgctatcatgttacaacatgaaggttagcaatatcacctatatcaaaatattgctacgaagccactcattcagtccaagctaacatagcatagacaatcgtacaaactgcaaaacaataatgatttgaacaaaaacttcatagattgagtcgcgcacctcctgcagcatcaagaagcatcttcaacattgactgagggcccaatgttgtgcgtatgatatccgccacagcctgcaaaaacagatcgaatggtatcatcaagtaattaaaaaaaaatgggctcaaacatgggaagccggttacatcatcattcttattactcaacaacctgtcaatgacatcaaacacaacatggagttaactacatgaagcctaaagaggtgaccagttgtaccttggctgcctggatgttggcatgatgcaccttggtgccagactcccgcttcaaagaatcctctgcattgccaaacaaaaaaaaaaaaaagggggaaataactcagattagtgacaaagcacagcacaccccagccgagcgaaggatcagatcaagaatccaaattgagctactaaagcatcatcagtggatcacgagacggagaaaggatgccggatggacaagccagcccgacctcgccagcagccgcagcggggtgaaagaagacaaatgaatttctcaaaaaaaagaaaggagaaaaatcccgcggtggcaagaaccctagcatatgggaggtgagagagatggagaggtaactcactgagcacgagcaccggcgcgtgcaatgccatggatagcgagaggcgcgaggaggaggatgcggcggcggcggcggtggcggtggcggcggcgggggttggttcgcgcaaacggaaaagagggggaggagggggggttgggagaagagagtatgtggaggcccactaggcccagtttatgaccatgttgggcccaatgaaacatatgggccttcctgattacacttgggcttcctgaccacactcctattgtaactttgggtttctacaccaagtgaagattgacaaccatcatctaactaaaatctattagttagagcaagtttaatggtagagtaaatttcacgaaactacatatactatatcaaattatcacaaaactacatatttaactcggcttatcacaaaactacacatttaacatcaaatttatcacaaaactacacatttaaaatgaagtgtcacaaaaccatatgtttagtaagtttaatagtatagccaactattagctccaccataacaatggtgctagggatttaaactccaaagttgtagttttgtgataacttcaatattaaataaatattttgtgatacttaaccttaaatctgcagttttgtgataaatttggtactaaatctgtagctttgtgataatttggtcaaaatacacgtagttttgtgaaatttactcttaatagtatagccaactactagctccaaatcatttatagtcaatttaatagtccattcatataatagttacatatgcatatatactacattgttaatacatggtcccacctctcatacacacataacattttggagtccgtactgcagttagctacaaatctgttgaccgctttccgtctctcccttctcttatctcatccacacgtgcttatagctaacttgtagcatgctattgtactcgctcttatacgttgcgtacatatccataattagagcattttcaccatcctcttatttaataccgtagtcctaaaatataagggattttactcatgtaattgtatgagcaaaatcccttatattttagaacgaagagaatagatcctattatattttgaggttttagtgttggatgtactacgcgctcctcaagtcaggcgccaagctgctggtcaccatcaatggtgcctgaaagtctttggttgtgggttcttgatgtccaaaagaaatttcagtcaacacaggggtagtccttgccatgcaataatcttagggcaaatcaaacggccagtgtgcttctcatcatataccattgaatggtgaaaataaatgtaagatttagcaatcacattatgtcaacataggggtagtccttgccatgcacaaatcttagggcgaatcagccagtgcgattctcaaacaacatccaacggcaaaaaggaattgttgtcaacagagcggtagcaattcccttcatttcactatcacaagagggccttggccccccaatcaaatcccgtgcatatcaaatctcgtgcatgcaagtccttaggatagctttcatagggtaaaataaagggaaacattattccctagagtttttcgatgtcacgagggctcggatgtcacgaggaattcaccacagaaggtcatatttcttctagtgtttgtccattccatataagtatttaacccaagatagttgtgcttgtgcctcatgtatatgtcaggtgggcccttggtccatattaactgtagtttttcgtccattccatataagtatttagcccaaggtaaggtagttgtgcttgtacctcatgtatatgtcaggtgggccctcggtccacattaactgcagactcattctaatgattctcccatctgtagcaaccatctccattacatattgctaagtccgctttattttccattgcattaaacatccactctatcctctagttgaaccggaaataaatggtgaaaaagtaagaaattactccctccgttttttaatatacgacgccgttgactttttaagatacttttagctattcgtcgtattaaaaaatttatgtacttatcattttactttattatgacttgattatcgtcaaatgttatttaagcatgacttaatttttttatatgtgcaaaaaaaatgaataagataaatagccaaatgtttatcaaaaagtcaatggtttcatatattaaaaaacagaggtagtatataagataactccaatttcacaaaacatgtcgctgtcaacagcgttggtttgttagtttgttgggtttgcataggtggtgagctgataagcattggcggcactagacattttggcgctcgttgtgcaccctatcgaagtgctatcgaagatcaacaatgtgcatagtaattaaacctaaatgtatcaattcatttagattgaaattgtgtatactacaaaattctccggtggtgaataaaattagacttatcacattactgtaacagcaagctgttcatagatacaatgtcggtgtcttagaatcaaaccatggacatgacctcgttgttattacaaataacactgattctcaatgtcacttagtacaaccgcttcattataatagtaagcaataacatgatacaaactttggtgcaaaatatataacatgaattgattctcagcaatgctttgctaattacactaattttgatgctgacgtcaatccaatgaatcttgagcaacatgctgaattgaagtcaaatgcatagaaatatgcctcattggtcccattgatgagatacttccctcattggtcccattgatgaaagtggatcttatttttgaccttataccgcagaaggtctagtttgtaacttgacgtaggtttagttcgaatctagaatctttaaaacaaatgcatcattgttgacctggcaactacctttataacattcacagatgattattcgcattatggctacatttatccaattaaataccccttatggccaaatacatggaccttttgcaaggtttctacatgaaaatggcatagtagcccagtactcaacaccgggcaagcctcagcagaaggagtagcagaaagacgcaaccgcactctaatggacatggtgtgtagtatcctaagccactccactttaacgataagtctatggatggaggcattaaaaacttctgcccatattcttaatcgagtaccaagtaaggcggtgcccaaaacaccgtatgagctatggacaggaaggaaacccacgctaaaacaccgtgtggggctgtccagctgaggcaaagttatttaacccaactattgggaagctagatcccaagacagtaagttgccatttcattggctaccctgagaaatcaaaaggtttacgtttctactgtcctgacagacacactaagtttgtagaaacgagacacgcagtgtttctagagcatgacatagttagggggagcatggtaccccgagaaattagtcttgaagagaagcgggtatgtgtacctactccgatgattcaagaacctttttttctcgatacctgctgctgctgcaccgacagtacagaacgctgcggtgacaacacctgatgttagttctcctgtgataacaataaatgagcacgagtaacctgagattcaggatcctccagaacaagttgtcacacaagaggaagagcaacatcagccccaaatagaagaagtaccacaactcagaagatctcaaagagagagaaggacagctattcctagtgactaccaagtttattctagtgaagaagttcaaacagagggtgatcccacctcgtttgaagaagccatgagaagtgctcattcatcaaaatggcttgaagccatggaagatgaaatgagatcaatgagtaccaacaaagtttgggacttagtagaaattcctaaaggagccaaaacagtaggctgcaaatgggtctacaaaacaaaatgtgactccaaagggaatgtagaaagatataaagcatgacttgtggcaaaagggtttactcaaagagaaggaattgattataatgagaccttttctccggtgtcatgtaaagattccttcaggatcgtaatggcacttgtttcacattatgatctagagctacatcaaatggatgtaaagacagcattccttaacggggatctatatgaaaacgtttatatggcacaactcaagggttttgttgtggaaaggaaagaacaaatagatgccatctgaagaaatccatttatggattaaaataggcctccagacaatggtacttaaagtttgatgaagtaataagacggtttgggtttaatgagaatgaagaggacaattgcgtttacgcaaagttcagaaatgagagatttattttcctaatcctatatgtatatgacatcctactagctagtagtgatgttgatttattattggagacgaaaaagtttttgtcctcgaatttcgatatgaaagatcttggtgaagcctcatttgttctgggaatagagattcaccgagatagaagaaaaggggttttaggattatcgcaaaaggcatatctggaaaaagttctaaagaaatacaatatggatgcgagtaagcctacacctgctcccatagtcaagggcgataggtttgggaaaattcaatctcccaagaaccagtatgagatcgattaaatgaaagcggttccatatgcttcggttgtcgaaagcttacagtatgctcaagtatgtacgcgccctgacttagcttttgttaccgggatacttggcagatatcaaggaaatccaggaatagatcactggagaatggtaaagaaagctttgcgttatgtgcaaggcacaaaaggcctcatgctaacgtacataagaactgattccctagagatagaatggtattcagatgcagattttgcgggagatgtagatgatagaaagtccacatcatgctacatattcactctcgcaaaggggctatttcgtggaaaagcttcaagcaaaccgtcatagcatcattgacgatgtatgctgagtttgtagctagttatgaggccacggggtaggcaaaatggttaaagaagtttgtacccgggttgaaagtggtcgacagcattgaaagaccactcaagatgcattgtgacaatgagccagcagtgttttatgctcacaacaataagtcaagtggtgctgccaaacacattgacattaagttttatgttgtgaaagagaaaatccaggatcagacaattagtctcgagcatataagtacaaaggagatgttagcggatccgcttacaaaagacttaccgcccagtgtgttcagagaacactttgccggcatgggtttacaggaaagcctatgatccttggattacaaaagggcctagtgtttatttctagatggggaggtacattgtagtcgttgcgtctgatggttcagtgatgactgtcgtgatgaagcatgctctatgcatcaatgtatttagaagtaaatgataagtaagagaagtaaaaaaggtggagattgaaggggagaatgttagttgcgatctccggggccctgatcgggggcgccagccgtttgatagctgtgggcccatctcacacagcgccatataaaacagggggagccgctggcgcacgcaaaccaatgttcgttgccgtgcacacgcgctccccacaaaaccctagaaaacccaccgatccgggataggcgctgagtgaggggaagtccgccgtcggctgtcgccactaccgtcgtccactccatcgccgccgcgggtcatccacaccgtcgccgtcgccgtcgccatcgtccacaagtccactgccaagccgccgccacaccgtcgtgatggccgcttcaacttccaagggcgaaggtatgtctccccctcgcttccattcactctctaagatcgccattatcaatgctatgagtagtactacctctagatccgcacatatgcaaaccctaagttctaacaagatgaaagtttagaaatggtgggagctagttgggccaaaatttcaaaataagaaaataggtaattttggtagggtaaatatggtaagaacctgttcagtttgttaccttactaaaattcggtgacagcaaaattttgtagggttgaaagcggaaatgaagtgaacaacccctaaggctcctacagtcgcagtcatgcttgcatcagtcagggaacaccactaccgggcaagcaagagatagctagctttggacttcttttattgtggtttgggcctttggcaagtaaaataaactacaataagcaagagaaattatgttttcttttttgattggattcaaggctaacagaggagggacagagaaaaacaacagctatctgccagtcaagaaacacatgcatctccaactgcttttactttcacttctctcggctgcttgaccatacataaagaatctacaatctttcacataacgataagatcaattagtttgcagccaagcatttttttccttccaatttgtcccaatgataaccgcaccaagttggtaaccaagagaaaaaaggttatggtacgttaataagaaattccaggtcatattccagaaataaaccaaataaaaatatcacagttgcaaatatgccttacgggttgtaatctgcattctaagtgtgcagggaaatatgtttcaggccaagactacagtcgagactaattgccactttgtcataacaatgatcatgagacatcaaagaaaagcagagagcagaagtcagaccatcgactaaatggttctgcggagcaggttagatgcagcaaggcaaaaatgtgacaaagttctaaggtccacaaaatgcttgccaaatcagttcttgtgagtaatgacatacaattttcttcttggctgttgtagacatgcttgtcaggtcattacgtcggtacagcgtaatcagttcatgtgaattgaaacatattattgtaaatctgggaatatattatgatatatgaaggctgcacggttgtccaaatatatgttgcaggagttgcactgcgaacttcaattttttctcattgcagaagaggatgatcagatagcattaaaacagcaactaacacatcctcccatgtttgccagtttcaattgtgcaaaaaaaaaaagttaattggatgtatgccacggtaaatgtgacaaataaaaaaatatcactgctatttacgtcattatatagatgccactgaaacttttttaaattgaaaccatgccactccgtcacccttcccgtcctcccccgccactctttccgtcctctctcgtcctctcttcacgccgcatatcgccgctgccgggaggggagcatgagcagcgagaaggggctccacgagctcggccccagcggcgcacgcgcggggaggctcgccttggagtactcgacgaacgcccggaaatcgacggatcatgtggtgaagaggaaggcgaggacatgggaggcggagagcgcgcagaggacgacgagggcgtcggtgaagtcgagcgtcaggaccacgaccaccagccagagcgcgtagagcacggagtaggtcgacgcccagtgccgccaccgaagcaggtccacgccctccaccaacttaccgcccacctcaaatcgcgccatgccggtgccgtagatcggggcgggagagcggcgaggtcgtcggggggagggggcgagctcagatcgggattctctccccgtcctcctcctctgccgccgccccggcgatggtccctcccggtccctcgttcgctgtcgccaaccccttccacttgctaccgtcgtccaccaccggcacgaacgtcatgggccagtccatggccagtcacctcctcgctgccggggcgccaccctcgcgaaaagcccgtgcgcggccgccgtcgcagccgatgtcatcttcctcatggtcggcttcccctctgacgtctgctccacctccctcacccctccacgggcgccctcgtcggcctcgccccaggcggcgcgctcgtcgacatgaccacctccgaccccaccctcgccacggagattgccgaggtcacggccgataaaggccggtctccggcggcgaccgtggggcccgcaaggcgacgctctccatcttcgctggcggcgacacagccgtggtcgcccgcctcacgcccctgttcaagctaatggggaacgcactgtacatgggctgaggaggaggacgggagtaggatgcgagaggacagaaagattgatgggaaggatgggaaggagtggcatggttttaattttaaaaattttcagtggcatttatctaataacgcagtggtatatttttgatttgtcatatttgcagtggcatggatccgatttaaaaaaataggatagataactatagtccctgtcatttgacagaagaaattataaaagccacaaacttcaattatgctaagaatgaacattagaaagctagatgacatgaaacctgttgaatcaaatagtggttattgggctacaaagttagtttgttggtccagctgccatgtattgttctctacctcttgccatgaccaatttgagcagctacggcacaaagagcaagagctgcaaaatttccccattacagagcacgaaccacttttttatcttaatctcacctgccagaacaacaaccaatcttcaatgttcaatctctatttactgaacatgaaggaatgcatagcggtgatggctgcatgagtgcatggtaatggattcgctgttgtgcaacatatggacagatccaatatcgtcgacagaaaaatgcaacaacggggtaaagcttcttgaaccagagctctccatcgcagccacaaaccgcaagaggcacgggaaaagggagagggtagaagattgcaattgctctattcatcccccttcgtctctttctttcatcctctcatcttggcccaaaaaagctccaggtgagagattgcaattctctttgttttgaattgcaacacaggaagagcatgtgaggatgacagcgactgtgccattgtcgcggagcgacggaaggaggcgaagagggatcatgggtgcacggtgcggtgtgagaaatctcgtgaatcacgaccgccgccgccgtgggagagagggaagcgatagggaaagcagctcgggctagagcttcttggacaaaaagaggcagcggggatgcgggccgacgagcgatcctagccgtttgctcaagccgatccgacggcgcgtaagcggcttgcgtggacacgcgagaggacacagaatccgcctgtctcccagtgcgcgcgcaacgtggatagccccgcatgcgaacacgccagtccaaaatgctgtggttcaagcaattcccagtaggtattaatataaccgattagtacgctggtaaggctttatggaatcattgttggcattacctcttgctgtgaattagagaaacccatactaccactgtattgtagagtcggtagcaatcctttcattgtgctatcacgatgtaattggccatcactatagtggacgttgtcaacattgacttgagaggaaatcatgtaaagtcaatctacatcatctatttgttacaattgccatacacgtttgtaacatcctaaaaattcccaacaataaaaatcactaaaatttcgaactttttaaaacttttgcatcatgctggttgttatgattcctattgcttgccaaaccataaatgatcaccaagaaggtaaagaaaagaactacatttaagcaatagatatgatttacgagaatatatttaatcctacaaataattatgcacaagatagataagtcaaatattaatttctattacaaattacaaattaggtattaaatattcgaaccatgattgatagcttgatgtcacaattagctaaagaaatagtaagattaaatctaattcatttgaatcgaatctcacatgaaatataagaacacatgaaatgatgatcaccactatagtgatcgtgtttataaataagtaattcaccggaatatatagattgatacttgcaacatgtcgccgagttactcatgacatgaaaatcactcatataaaataatggtcatataaataaattaatccttatatataaacaagaatatgtgagtgtttaaaattagattaatgttgtaccgagtcttaatatactatttatagaataaatagattcaacctatccgtgtaaaatatattgctataagttcattcaatgtgctattgtaataataagggccacactaggatattttagaaccctcaaagcctccaaaattatctaggctaattttagaattagacctcatttaaataatacaatagaaaaatatatataagaataaaatatgggtaatattaaaatttggtaaactttcatctaaattaaaacatatattgggtaaaccttatttatgtaaaaattaggatttatagaatgaaatttatacaagggataaactaaaatcgggttaaatagaaaatggcactgttcattgcactctaggtgctcgacgtggtccctggctctattaccccctcctcagcctcctcagccgcgcgcgcctggctgcctcgcgccccgcgccacgccgctcgcgtcgcgtcgccgctgccgcgccgtcgccgtcggccgtcccgtcgccgctcgtccgtctcatcgtcgcctcgcgccccgcgcccacgcgccgctcgtccgtcgctccgccgcctcgcgccccgcaccgcgtcgtcatcgcctcgccgtcgccgtcgcgccgagccccgtgccgtgccgcgccgagctccgcgccgcgccgtcgcgtcgccgctgtcaccacctgctgccgcgtgcgcgttccatcgccgcctcgagccgtgccgctgccgcgccgcgcgccgtcccgtcgcctcgcgccgcgcgcccgctgcctcgcgccccgcgccactgccacgtgccgcgccgccttgcaccccgagccgcgccgcgccgtcgtcatctccacccgcgcgccgcgcgccgtcacatcgccgccgtcgcctcacccccccttccaccgcccttcccttctcttccatctcccccttatcctctctttcccctataaaagcccaccatcctcccctctccccactccatcccctccttctctcccttttccctccccttctccacgcgtcgccgtcgtcgtgccgccgcgccgccgccttcgagccgccgcgccgccgccacgaagccgccgcgctgtgccgcgccgtgcgccgtcgtcgccgccgccgccatcggtgagccgctgcctttcccccctgtttgtcgccatgccgccgggtagagagagagccgagagaggggaaggaagggagaagccgagggagagaaagaagaaggaaggaggagagaaaccgggagggagagagagaaggaaaaagaaaagaaaaggaggagagaaaaaggagagaaaaagaaagagagggaaagagaggagagaaagaaaagaaaaggaaaagagagaaaaagggaaaaagaaaagaaaaagaaaggaaagggagaaaaaggaaaaggaaataaataggaaattagagggagattagggaagtttagaaaatttaaaataattagaatttaattatagattaattatagtcgtagaattgcaaaatttaatataaattatggattattcttggtaatttctataagaaatcaattcgcggtagtaatttagacgtaattaataactaaacaaatagatgaattcttatagactattatagattattttgggtaatctctataagtaattgattcacgatagaaattcggatttaatttctaggaatcttagccgtgtattatatttaatcgtttagtcatagactaaattaaattgtataatatttctaggatttcgtccaatatttagcttgtaatagaaatttctaacctattatatacaatgctcggggagagtaaattattgacaacgaaataattatactcgcaaaatagtttaaatcgaaattgggtttgccgtagttcgcagatagtaaagttaataaaaaggaatcgactttcgcattcgacttattagttatttaaatagagttagccttataattattaggtaagtaaaatatagatacacatagatcggtcctaagctttttatggcaaataataacagagctagtgtgattaaatcatctatatgaaattaatcaacgacatatcccatataatagcatatagtaggagaggtgagcaacccttagttaaccaagcagtaaatagaaactattcaaataaatgattcaatatattaagatattgtgcacacatatattgtacatcccattatagatatatggtatcgtattaatttgcttgttgcatatattaatttagagggagtatgtgacgaacatgaatattagataaatactagttatacatcttgtcctcgtataattacagatcaactgtaaatttggattattcattgtaaaattatgtgatgggataatccgtaaccataatatgattaacctaaacatgggtaattgttaaccttttataatttattttgacaagtgaaatatgtacataattaaattaaagcctccattaataaaataataatacaaatgattcacagtaattatttgaccgatccaaaatccatccggcaacagaacctctagtgtataaccgttctatttagatagatgcatgtgtaaccataatccttccttagccattagctagactgaaccaccatgacaacagaaagactaagaaaccttagctcttagcttgattagagtccattagcaagcgcgaataatatgagcaaccctaggttcgacctcagcaaatatattttgtttgtgcatatttgattgttgcttgaatattggtttttctcgcgtattatagaccttgtgtatcggttagtcgtgaggcaacgtctgcaacatccaggaggtgaaggttgatcaagattatatcaataataaggattatcctgagcaagacaagtcatcactattccttgaacatgttgatcccacttgcgaaattgttttgtttacaaataaaattgcatgcaattatgaacatcctacttgtgattataccatgccttgattattgttcacctttaaatctttgtaaccatagatacgtacgagtccctagtcaactatgacacttgcttagaaatgctattttagattcatgcatactcatatttatcaaatgctatatgcttgggcaattacccttgggaaggtaattgagatgcggcatgtggagacatgagcgccacattgccatgatattgatgacatgatttgtgaaaggaaaataaagtaaaacaactgttttcgactggggcggctggaggacttgggtggtgtccggaaaaggctagtgccgtccctggtcaattaaggaccgagccatgaagttaagcatgaaacgacccccgtacaaccgcacttctcgtatgggtatagacctagcggagtagatagctgagcggaggcagtatccatgcatagtggtttcttgatgtgtgaggcaggggctctacggtggggcagccattggtaggaccgcgaggcgggtgtctacagtggtgtcgccatcggtaggactaccatgtgagaatctaaaacataattataacttaatgcatgtgtgagtcttcccttcccgggtgcgccagaactcctctcactgctagaaaccgtgtacgcctagagtgcatgaggatgaaaagttcatggagcgggtactgccaatgcgagggattagtactaccaactactgatccagggattggtacggataaacacagaagatttccgatttccaaaatcgggggtctacacgtttgattatattacattggcaattttgctattgaaatttaatactagtctatactcgtctcaaaatataatatctagaaccaaatgacacatttcctagtactacgaatctggataaacagtttatctttattcatagtaggaaatatctcatctaatactgggttcttatatttcgggacatatgaaacagttctctaatggttgtctttattcagtttttattttgggacatatggaatagtcctcaatggattcacagtgattagtgaacagactatttaaaagtgtaaaacttgcggcagttattttaaaaagtcatcctcaagtctgtttttttttctactatcgtccgtgtgtacatcagtacacggagcagcacgcgggtgacaggtttagcttggctaaaatataaatcctgttgcatgtaactacctactgtacctaccgttcccgtgacatgggacaggttgacaaaaaacaaagtccactgtacgaacacagcaacaaaatactccctccattccattttaaatgtagtcgtagttttccacgcccaactttaatagtttatcttattttttaaaaaaattaaaacataagtcacgggtaaagtactattcatgttttatcatcttataataataaaatatattaattataaaaaaattttaaataagacggacaattaaagttagacgtagaaagtgatacttacatttataatgggagggagtgaatacgtaaaagaagaagagaaaaaaaaactaaactcgtggctgggaagtggctagagtacctgccacccacacatgcccggtccgtccatgtgccacatagccaataggtcaactgcacacgtgccgcctctcgcacttgcccatttggagcgtccctgggtcgacgcgagaggccggccggcctgcctctgcctgccggcacacgacgcatcgatccgcagtttgcgacgcgtcgcgtgtcgcgatgcgcgtcggcccaacaatgtcgcgttcagcaccaaatccaatctagacatatatactccctgcgagacgcgctgccacgtcctaagggctaaaataaatactactgcgtgtccgtattttaatatggcaaaaattagttatataacatcgaaaatttacgttttcacttctatagcaccgaaatatagcgtttcattttaatagcacctaaaatttaccacgtttctatttttaccactttcatcaattctcgatcgttttcagtaaaccttgatcgctattgattcagccacgcatatgatatgatgtttctacctttgattgtcatgcattctacttgtacttgtgagaatagaaaggtttctacacctccatcctattttaagtgcagccataagtttctatgtccagcgtttgactgtgccgttttatttgaaaaatttataatttcttttaaaaaattaagtcacacatatagtattatttatattttatcatctaataacaataaaaatgataataataaaaaataagataatcggttaaaattgggtactaaaattaacaactgcgcttattctggagggagtacatgggttcagattcctagtcccatgtattccatctcataatatgttgctatatttatcacggaatcgctcctcatcaatctaaggctggagtttaattccaaactttttcttcaaacttcgaatttttttatcacatccaaacatttctacacacataaatttctatttttttatcacatcgttttactttcaaccgcacttctaattttagcgtgaaaaacacaccccaaatccggtggccgcgccctcctctcgtatttatcccccaccaccgcgccgctatccccgccgccgcctcacctcaccgccgctgcgtcccgactcccaacgatggcgccgcctccgccgccgacgcgatgcctccccgtcctcctcctcctcctcctcgtcgtagcgccactcctcgcgcatggccgccgccccttcatttccgacggcggcaacgctaacgctaacgcgaacgcgagcgtgctgcggctgccgtcggcggcggcggcggcgggggaggacatgggctgcgagatgtcgtacgggttcctgccgtgcacgacgacggcgtgggggaacctgttcctggtgctcgcctacggcttcctcatgttcaagtccgccacctacctctcctccgggagcgagatgctgctccagatcctcggccccggcatcgtcggcggcctcttcctccccatcctcggcgccctccccgacgccctcctcatcctcggtactccctcccctccccttcccttcccttcctcactttgcacaactcgatcgctcgcgtggtgggatccgcgctgctgctgctgctactactactactactcttggccgtgaccacgagagagatcttaattctttctttctatgattaaaaaggtccaccttggactgtttcatgctagcaacgatcacctttatcgcttgatttgatatgcaaggtgacgtgatcgttgagattcacttcaccacaagatgcttaattagcttcagctgatgacaagatgcttagctttgctctggttttattggatgaatggtaccaaaacaataatcgaatgagtacatcattatggattttatgggcccttgagatgaggtcccataaaacgccaagatagttagcaaggagctactcaactaacagctggttagtccttttttcttgtgtccagctgaggtaagcttgcacaaatacctataaatagaccatgatgtcatacgttgttgcaccattctacatgatggatttgagttgcatgtgcaagtgtgcatgcaaattgcttaacttggtcccccatttgttgcatttcagtttctgggctctctggcactaaagaggttgctcagagtcaggtcttgattggaatgggcctgctcgcggggtcaacggttatgctcttgaccctactctggggatcttgtgttgttgttggcaagtgtgatctgtcagagaattcaaccgcaatcgattcacgggataccaaaggcttcagtctattaggtatgccacatactcactttgtgtttcattctcttttgttaatcttgttccattatggatctagatttgcagaacatccttttacctgaacaagaaatctgtttttaatttgcaacaaggccatgctgggctcatggcaggtggttgtgacttttaagttcagttgaaaatttggtgtacgagcttgcctgctgacatattgatacggttattagggcttagctttcaagaatgtgatgccccacatgcctaacaatgtagttatcttgataggagctgctggccttcagtttggctttaagttttttgataagatgacatacatcatgaaaaaatatatgttttcctttaccttctgtacttggatttgacacatgaagtttctacgtggtatcagcattatgttgggaggatttcgtgttgttcttttctcaacttaatcaaatttgcatagtgtgaattggtaggcatatcctgcattatatcattataatattagttaaaagaataacatctatgttaattcaggctctggtgtttcaactgataagcaaaccagctatgcagcaagaatcatggcgatatctattctcccctttattattgttcaaataccgaagatttttaagctccattctggtcatcagataacagtccttattggacttatagtggcagctctactcttgctttcttattgtctatatcaggtattgtaatgaccttggtatatatactttatgccttgccatccttttgttttggtttgtgtcacctatgtaattttgtcttaaaagattagtagaaatattcttgcatcaacacacttgatgactcgtaaaacatagttttgaatcagaataaatggtgcccttctccaacaaaatttgtcaggaaatgaaaccgggtcacaaatatctgtagtttcattataggttctggtttttttctggggacaactatacattgctatagttgactacattcatattttaatctacattgcccattaaagacttgcatttttcacaaacaggtctttcagccatggatccagaggagaagattagagtatacaagactgaagcatgtaatgtctggacttctgagacatgctcaaaagcattcaattggtcgccttcttgacgatgagggaagacctaatgtttcggtgatagagaagtatgtttctgtcctcacccacatggtttttttagctatatttcataaagaggtgctctgttaaatgaaaaccgaaaaattggcaggttatttcacaggattgatcaggacaatgatggaaagctagaacgcggcgaattacaagctttcatcgttggtattaactttgaagatattgactggaacagtaaccttgctgcagatcaagtcatggctgactttgatacatcacggaaccattttattgaaaagggtgaatttgttaatggaatgttgagatggctggatgaagctaagcgtactgttacatctggtgcctactcaaaaaagttcttgaatgattttcatgcggtatgttttttctatcagcttttttgttgtagagttgatttatcatggaaagataaatttcagcatctcacaatgtttcagagaacaagggatgaacaaaccggtctgctcgacaaggatgaagaggaaggtgaagctgatggaaatccaacctggacttgcattaaggccatcttacttttgcttctgggaactgcaatggcagcagcatctgcagatcctcttgttgatgctgtgcacaatttctcaaatgctacacatattccctcctttttcatctccttcattgtaatgcccttggctactaattccagcgaggctgtctcagcaattatatttgctagccggaagaagaaacggactttgtcactaaccttctctgaggtatgtctattgagtatcttgtacaactgaacccctaaataaacaccatcattatctgttgcttctgttatctaaaaagttgaattcgttattactctagcttcattacccttttcctttttaagttgtctgcatttagtttatgcagcagtattagcagccatcagaagcaccaaacaaatttcatccgatgccatcattttaactgcaggtctatggtggagtgaccatgaacaacacactctgcctcgccgtgttcttggcccttgtttacgtgaggggcttaacctgggatttctcatcggaggtactcatcatcctcctcgtgtgcatcataatgggcctcttcaccagcttccggactgatttcccactctggacatgcttcgtcgccttccttctctacccgttgtcgctgatcatggtctacatccttgactacaagtttggatggtcgtaggcctgcaacgttgatacatctgatatacacatatagatgacaagcagtataattgatcagtaaccactcatctaccttttgtaagtcttatcgtttaccatgttacctggaaaggatgcggattgcaagatatagatagatatgcagaatgaactttgttattagagttgaaagcattatctaattcgaaacatgcgcatcatacatgtttccttcttttctttttaatctaagaggacgtgttgcaatattgcactgaagctctgatgatctgaaggcctcaaagctagaattgttcactttttgggcgatccacagttgtagttcctttgttggcctagaggtggtcggtcacgtttagcagcgatcgggctggtgctagttttctcatgagtttgcgctgcttggcgctgtcggtgtgtgggtgttgtatactttttttcttatcctgattacagcctttcagggttgtaatcttgtaattttttttctgccctatcaatatgaatttcgcaaaaaaaaaagaattgatgacttatcactctatttgtgagaccattctgtccagtgaaagctgatgtccatttacttgggtaaagattttcagttgagccaagcaaaccattccagctcaacttacaaactataataagaaaagagcatcgaatcaagttagctgcaatattcacctgtaataaaatatgaaaggatgacacatccggagtcaaaattcagagagtgatactctgcttggaggaaatcaatcaacaaacggatccaactcaaagtagatgcagatgaaaacacatctgctgaagcgctgatcaaaacacacgtacaatacaaacacacacacagtcctaacatgatagcacttgcacttgcacttgcacctgcacccgcgccgccacggcgccggcgtccaccggagagcggcatatcgggcacgtggcgtgcgatccgagccacatgtcgatgcactcctcgtggaacacgtgcaggcacaccggcagccgcttcgccgcctccccttgcctcatctcgccgaggcacaccgagcactcctcgccgccgccgtcgccgtcgtcgccgccgccgctgtcgccgtcgctccctctcctcttcttcttcttcttctcgtacgcgtacgccaagagcgccacgtcgtcggcgacgaccggcggcgcggagggctgcaccgctgctgccggcacacggtggatcgggagcggcggtggcagcggcggcgccaccacaacgacgacggcgctcggcgccgccggccgcgccaccgtcggttcttgatcatcccggaccattcctcctcctcctcccgccgccggtgacctgccacggcgcgccctgtgcacgacgacgaagacgacgacgaggacgacgatggagatggcccacgggacgccggcgacgtacacgagcacgccggcgatgacggcgagcgggacgacggcgagcaagagcttgagcaacatggcgacacgacacgacactttcctctctcttcctcctcctccacaacaatcgcagaagtaattatcaaaaccaaaaacgcggttgcaaatgcgtgtggttaatttgagcggcaagcaagcgatcaggtcggtcaatttcgttgattaattttggtgattttaagtccacatttcgatctcattttggtagcgacatgacgagagcaaagacttggcaaaaaggcgtacgctgccttcactgagctgtttgtctgtaggagagatcagagccgttggattcaatggaaaacaggaaaacgtagccttccctgcccacgtgtcacatcaccgtgccgttggatttgggcggcgacgttgacgagatcgggtcagctagatttggaccccaaaagttctgaagaaatttcctgcagtagagcagtctgcagtgtcttccccttatcgaatcatatgaaatttgtttaaatttggtttgaacctgttggattcaaattacttttgaaaagtctcagcaagatctcgccatctccgtttagttacaaattttcatcgaagctttcttcgaagattagctgcaacttacatcaggaagggattgacgtcgagtactacctccggtgggcgtggaccccgttccagcggcggcgggcgcaccggcaaaccgggcaggtggcgctcgcgcgcaggcgcgcagccaccggtcgatgcacgcggcgtggaacacacgtgctggcacgccggcagccgccgcaccgcctccccctgctccacctcgccgtaggcacaccgcgcactcaacgtcgccgtcgccgtcgcggtgcgcgtaactcgggatgccgccaccagcggcgagtgcgccccgcatctcttcgccgccccggcgccatcacagcctattgcttgtgcgcgggcgcggcggtggcggcagcagcaagccggtgcgtgcgcagccacggcgggcgcttgagatcggcgtagaagcggcagcagaggacgagggtgaggtgacgatggtgatggagtggaggaagacgacgccacgacggcggcgaagaagatggcgtgggcggagcgcgaggtcctgacgaggtggacggcgaagtcgcagctgtccgccggcgggtccgacatgctgcttcactgcttcagcgttcgtgcgcgcctccgaccgccgataaactcggcaatctcaccgttaaaaaaaaatttaatggagcgaaaggtgagtgaaatgagaactactacacgacgggattccgtttcgacgggataagttatgacgctgacatacctccctcgtgcctcgcgttccgtcgcttccaactcccatttccaacccaaatcacacatgccgctccacgctaaatgcgggttattcccactagtgcaagtgcactggcttggaccggtctacgtgcaaattaaggcttcaatggttggtgatcttgggagagctgcttagttgggcacctgagctgtgatatactccctccgtttcaaaatgtttgacgccgttgactttttaaaacatatttgaccgtttgtcttattcaaaaaatttaagtaattattacatcttttcctatcatttgattcattgttaaatatatttttatgtaggcatataattttacatatttcacaaaagtttttaataagacgaacggttaaacatgtgctaaaaagttaacggtgttaaacatttcgaaacggagggagtattgagcttgggctgggcatggttgaatgccttggcaaggcaatatgcctctcgagccaggctgggaaaaaaaagatactccctccgtttcaaaatgtttgacaccgttgattttttagcacatgtttgaccgttcgtcttattaaaaaaaattgtgaaatatgtaaaattatgtgtatataaaagtatatttaacaatgaatcaaatgatatgaaaagaataaataatttcttaaaattttttaaataagacgaatggtcaaacacatacttaaaaagtcaacggtattaaacattttgaaacggagggagtatcatttttgtcctgataaatcttcgatgatacactattattatgtctagtgtcgggattgactagtgcacattacaccattaaaacggtatactcgtacaaggcttccatgatgtgatgtatatatgcttggcatgtaccacgtaccatatatgattcatctatctactatacatgatactcaggtatccaatatgaacctatatgtataatacacgatacctgaaatttaagcatggtacatatgtgtaccgggtctaatatctatatacgtatcgtgtctaatactcaggcaccgagtctaatatgtataggtatcgggtctgataattagataccgagtttgatatatagaagtatcgggtctgagactcaggtattggttacctgatttcatacatataggtatcgggtcaagaagaaaaaaatatgatgtgtgccacatgattactactgtgctaatatacttttcttgttccatatcaaatcttaaaagcatcccgcccgcaaaaagaaaattaaaaacatagcaggaaaataaggggggaaaacgaaaaacaaaagtcacatggacggtccagggtatggatgggttgcagtcaggccaacaaattcacatgcccaaacgatttacgtgggtctgagacctgtgtgtatcaaaaatccttatgcagtaaaggagaaacacatgtatgacgccgccacgtagtgggaaatcatacgcacatcatttttctgattgaaataacgtttaccctagtaacttttgagttgtcccgtttccacggaatattgttatctagattttctcttttttttttccgagaaacctatgcgggcttttagtttcacaatctagggatagattcaatccagttttgtattcacatcagccccttctaatccgaaaattcaaatctattttgcaatacgatttatacggttttgctcaatcatttttcttatgcgaaacatagtacaaatgcatacggtcaagctgttattgttcttccatgcactagtgcaacagaattggatactaatactattgatccttttccttcttaaccttggctgaacctcacaattattcaattttccctgtagagtgataatgggaaaattagtgctgattattgtctcaagagtattttgcgtctactgtattttccctctagagtgatactgtctgaattgtataattgcacagatgatatattcagccaatatacagtctgaattctcatttctcacacactcgaaatagtccataactcaattagtacccagtaatttccttcaattctccaagtacatatacagtttaacagtttatatacagtgctgtttgttaaatgagaaaaagaataagcacaagcaaaagaatgcaagaacggcgtagagcatctcgctgactacaccatttgagccggcaatggcggcgccgccgtggcgaaggcgttgcgccggcagaccgggcaggtggagttgccccgcagccacgcgtcgatgcaccgctggtggaacacgtgcaggcacgccggcagccgcttcgccatctcccccttctccacctcgccgaggcacaccgcgcactccggcgccgccgccgcgccgccctcgccctctcccgcaggcggctgctcgtacgcggggatgtcgtccgccgtcgccacccgcgcgcctccgcctccgcgcacggtcggcgtctcccgtggctgcacgccgtcgcgcaggtggctcggcaggccatcgccgccgccgccgttccggcgcgggagcagcgcgcgcgcgcaccgggagagcgcgtcccggacaggagccagcgggcgccgcagcgacgcccacgggaagaacgcgccgcagaaggaggcgtagacgcaggagccgacggcgacccagagcgccaggaagagggagagcacgacgagggaccccgcgtcgccgcccgtccgcgacacctgcacgatcccgtagacgatcatcgccgcgccgccgatgcacacgccgttggcgatcgccagcatgtagcaccgcacgaaccaatccatggcgcgccgccccggccgcccgccgccgtacgtcgacgacgaaccacgggcgcggcggcgacgcgatggtcgcgcgtgtggtttttcttggggaatttggaccttacaggggcgaggtctcgtggacgccagcagcgtcgatagcgatttttgccgcgagatttcgtagtttttgcgctatgtcgcagcgacgcttgcctggggtaggcttgaactgtgcgtgtcttttactcggctaagccatcgcacagatcgtcttatgggggattaatttttggttcagaattcttgcagaacaagaagcactggttaatctgtgagccgatgacaatatactactgctccgaaacatgggtcgttgacattatattcagctagcggttgatgataagttttgtagtttctcttgtggattgactttgtatcattttattaaataaaaaattgaactttgtcgatttatatataaactaggaaggtagcccgtgcacatgcacgggcaccttgtttaatgctgatttagtttttcgaatgtttaatttttttagatatactgattttattagtcttgctaaaatgtttaaatgtttctatttagaattaataatttttggttcaattttcatttcctttcatctcttttttttgggagaattccattctatgaaacatccttgaaatgctttgatccctgtaattcgggatgaaaatatgtgggttgatcctataacccggcatggggtaaaggtatccattctaaattatctctctccaattaagtaagaaaattttaaataaaggtcatagtttttttagcaaattaccactaaactggagtgtcatataaaaatacacgcttctagaatgttctatgctaaatgtcaggaattcatgatgtaccgtatcaagtttaaatggacatttttcttattcctatatggaattagcttatatattgctaaggcgacgtcatggttatttcaatgttaagattccttagtgcaaccaacgtgctctgtacgatcaatatgatattcaactggttacgcgacttcatatatcacatatataatttagatgctatgatcatcttaagattatttatttatctcttaaaaagatcatttattgataaaagatcaatataggaatgtatgggtaaatagctcttatatacatgctgagggaaaaatataattaagtagatagaaagtcattagatgtctaatggaatataagtaatgggtctaccagttttatgaaaaattaaggtgggatattttgatttttagtgagaaattttagaattttcttttatttagtggaggcctcaatatggatgtgggtctagaatgtaaatttttgttagcaaaatatagtccatatgggtattaaattattgatttcacataaataatatggtaattcaaacagatcataaggggcatagggatagctggctggacctaatatatggaggttaaattgtggtcttttctttgcccataaagataattttaattttaattgttatagagatggaataaatagagaaaagtaatgccgcaggaatagggatggagggagggttgggatgtttcttttctttaaaaaaatatttatttaatgatatgaaataatgtgttgatgtttaagtcaaaaccgatggccggatgttttttttttctcagatttattaggactttctgtaatttaagcgagattagtagcagcttactaaagcatttacgtactttaatgtcctaattgtttgggatttttttttaaaaaaaatctaataacaacgtaaaataatgtgtccatcgatttaagtggaaactaatggttgaatgtttctataatttaaaagtgccacacaactgttagagagatttatagtatgtttagtggacatatgatgtatttttgtgggtcttttttttttccataaagataattttaattttaattgtgattacgatgaaaaaaaaagaaagcaatacttgtgtgctgcacggaggcgcggcgttgagaggttttggtttttaagatacatctaacattctaaaataatcggtccactgatttaaataaaaatggatggtcagttttctctattttattaaaataccatgtggtggcttgggagtatttttagggtgtcacatgacggcttaggagcgtttataaaaagtttaataaacttttaatatgttatagatagatatgaagataaaattagggtgcgtaaaaaacaattaggatatgattatttgattttaattattacaaacttgacaaatgaatctatttgactttttaaaacaattggcaccttatataaattgtcaaaatttttgtggcgttaggatttgaaatattttgaatttgtccattgatgaaagaatatgaattttaattgtaaattcaaattttatctttgagctacgtaggatatataatttattgacagcgtcctgtatataggagatataatttgctagtcccgtaggagtaactaatctggcttgcctttgcttagagatagatttggtatcttatatggaagaagcatcaaactaatctacataagatggatgcatcgtgcgggaatgcacatgtgggccctcgctttctatacacacagatacacgatacattgagtggggctgcaaatgtgggtccctatatatatcttgttgtgccatgtggcagcttgagatcgttttgaggatgtcacatgtcagcttgagagtgtttataggaaatttaatggacttttagtatataatagatagatagaagatagatagatagatttgttggaactgaaaaaactagacaaaaaaaattgcagaaaggaaataatgtgaggcaatcaataattaagtaatcatgcgtataccgtggtatgcgggcggccagtacagtactactgcatgcatggcacgtacatgtccattaactaatatcgctatcacgtactagctatacgtacgtaatacgtacactacgcagcataagaggatggcagagagaggacagcgatagcatacatatgcatgcaaatcgaccggccggccatcagatctgatgagaccggctgatgagagcagaaagtttaaattgcattggtcggaaaatgtattattgcatatgcatgcatgcatggaccgttaaaattaaagtttggtagatttgtagtactaagtttctaaaaaaaaagatagatatatgtactactactaccttaattataatgtgagacgacgacgctatagcttaatgcatgaggtgtgactataggagtagttgtgatcagtgtaagttaaggctgtcgatttgcaggcagcaggccggccaggggcgcccctgttttgttggtaagttaattaagccgctccctgtgccttttggatacatgtagtaatacgtcatagtgtaatttgtacctgatctgatgcatcgatcagtaacaaagttaacatgctgcatacatgcaggacatatgaaaagtgagaaaaatataccgagcctacttgtagaaaaaaataatttatacaagcggctaatgaaattcattttcaaattaagacaggtgtaggtcgcttggtggaaatggagcaatttccacatatattgccgaacctgttgctgtatctctcaaagaaaatagtcgtagtagttaattcagagcatgcacaagctagcctggtcgatcagtgtgtgaatgaactctgaacttgaatatattaattaattatcccctccacgtacgcgtatgtatacatacgctgtacggtggtggtgtagactatacgcgtacgtatacttgagaatacacaatggactagtactactctagcagcgcagctagctagagcgaggtcaactggcggatcaatgtgttccacatgtaacgagacgacgatacgatgcgaaaggtatgtaggaaatccgtactcctagctatacccctaggtgtctgcatgctagaacgaagtcgatcagtacgcgataacgaacatgcgaaagataacctctgttttaaaatataacaaccgaaaataatgtacgacatgtaataatagttcaaacaaatctggatatatgaaatgtctcattttatttctaggttgttactccctccgtttcacaatataagtcattctaatatttttcacatttatattaactagaaaggtagcccgcgtattcgcgcgggcatgtatcataggttgtgttcaaacactataacgacgtaatataaattggagaacatttccataatatatttaccataaaatagacgatagattttaatatactactaatgtgataagaatgtccctcgaatttaaataaaaattcctttgtcctggtcatatataaactggttgtttctcatcattacttactatcattgttttaagagttaggtgcacttttaataaatgaaactatattagtaccactaaaataaatgatacattattgttacattataaaaattcatcacttattttcacatctatgtataaatagtctaaatataacatatctaccgaataatacgataacatctttaaaaataaacatgaatacctctctaacggatgaagtcaaatgtatctgccaaccaaggctttcatatgtaatgccttgaaacatataggttccgcatcgatgtagccatgccctaaaaaaacatcatagagtactattttaacacttagtttactattggtacactcacaaatgattatattgataagtctatcactttagttacattgtctatggtgaccttaactcaacaatgtgcatgcccatacaatatttacgatagcatagcaagtactgcactttgcattaaaggacaaaaagggacagaaagaagaaggaggtgattgaaacaatttttttttaaagtttcgagtcgatttgaggtagagaatagacaatgtgtatatgaagttagtaataagtgcttctcaaattttaatgcaatacaaacagtattatgtttttcaaatgagtggggttaatcattcggcactacttagaaaaaaaagctatagctaaagagacgtaccaccatgaaaatctacaaaacaccatatctttatttatattttgataaagattcatcctttagtgctagattttttttaacatatattgtttataactaaatgagactcatttactaattgtaataatgtacttattttcacaaacttatttacactatctaattcgctagagtgcacttattgctgagtttcagtggtgtatgacattcatccatcaattatacccgctatattagaatttctatcaattaaaaaatataatataagtagttttatgcatgttttattggattattcattttttccaatactatttggcaaagaacatacataattctcgtgatgaattacgggttgtattgtagcaaaataactgtctaaaatcttatttatttattttttcatatctatccatcttgtatgcttctcactcctcaaatagcaatcaaaaaggtttgaaaaactttcagatacttttagaatctcaatctcacccaaaataaacctaaaaaggtctacttaaaaaccaaagctaaattatatttttttattatcactggctaaaatttaatttaatttttctcatctatctattatttgtgcttctcacacctcaagtaagaaaatttttgaaaacttccaaatactttgagaatctcaatctctcctaaaattaaataaacctaaacagatgtacttaaaaaacaatgataggttttgtttttttaatttttacacatgtagattaaaattaacgttgtatatttttgtcaagtgatatttgacactgtaaaatatgatatgaaattatttgaaacattattatcgtattaactattacatgttagcatcatttttcatgatatatttatcactataataagtttatattaagtttaattgtgcatatatgtgtagtattatttttaataaaatcgtagattaaaggctgttgacaacaaatcagtgccgacactgatgatttttcctgattagtatatatttccgattttactatgtacctatgcatgttttcttgttcttttttggctttatttttttttatagtatatgatgtaggtatttaagttttgttttttttccgggagggagacgatcgtatgacgtaagcgcattatgttttttccgggatagagattagcatcatggtatttttaagagctctaatccattgtttaaaataacaggtccactaatttgagtgaaaactgaaggttggatgcttttctttttttattctgaatttctaggatttctgtaattttattaaagcgccacgtgacaatgtagaagcatttgcagtacgtttaatagacttttaagtatataatagatttctaggatttctctaatttatttgagagccacgtagcagagtaaaagagtttgtacaaagtttaatgtaattttagtatataatagatagatttagaagatggtttaaagaacattgattggatatttattatagatcttaatttaactaaatatatttatacatgtgaagtaatatattttatctttatattgtagaaaatcatattttaaaaacggttgatttttatggatgtatgttgtttgtgtcttttttatgtacaagtgtatggtttttttttcttccagcgaaggttaagaaagcttgatcattttattttcaatcatgtacgtttgtatgttacggaaagaacatcagtaacgtttgtatcgtacaatctcatacatacgaacagtagcagctagcgtttgtatgttataaacatgtggaagttattatttttttaataatagatctaatctaatggtgtaaaataacgggtccaccaatttaagtgaaaatcaacggtaagattagatagtgccatgtggcgacttaggagtgtttgtaggagtgccacgtggcggctttagagcgtttgtaggaagtttaatggacttttagtatataatagatagaagatattgcaagaatgtgtcttcgtttgccttttattttgtgctggtgtctatcttaataattttatttgttttctgtgtgttttagattcctatattccaaactaagacatataatgtcctcatgaacaatttcagtgtgtttttcttgtgtaatcggaatcagttcaatctttgtttatgtacattttataaggcatcaacaaacgagatgtttctaggtggtaataaaaaatatgtatttcaccggcaaaaaaaaagggaaaaaaaacccccccgagaggtcacaccatttgggccggcaatggcggcgcggcgaaggcgtcgcaccggcagactgggcaggtggagtggtcgcgcagccacggatcgatgcaccgccggtggaacatgtgcaggcacaccggcagccgcttcaccatctcccccttctccacctcgcccaggcacaccgcgcactccgccgccgccgccgccgcgccgccctcgctcgccgccggctgctcgtacgcggggatgtcgtccgccgtcgcaacccgcgccccccacctcaccggcggctcgcgttccagcacgtacatgtgcggtggcagagcagaagcggacgaggaggtgctcgtcgccggacgccgccgccgccgccgcgcgcaccggcacggcaggcagagcagccaccgggcggcgctcgggagcggcgcgaggcaccgcctcagcgcggaccacgggaagagcatgccgcagaagaccgagtaggcgacggcgttgatgctgacccagaacacgaggaagatggcgagcgccacgacgccgcccttgctccccggcgtccgcgccagcctgacgagctggtagacgagcaggctcgtgccgccgatggacaccgcgttggcgatggccagaccgtacacgcggaagcagcactccatggccggccggcgacggcgacggcgagtgttcgatcagtagctagagctcgccgctcgccgctcgccgcggacgcgggctcgctggtttgtgttgtaatcgatttgggggaaggactagttaagctaagctaggctgctgcgacctgcttcaccggtcggaatttctccggaatttgtaaggtaagttgtgagaaaattacgtctcgtatcgaggaaaaaacaagaagatggtttgatttgctgttgtgcactttgattatttaatactatgacattttaattacacgtctgatacacgtaacgaagtctgcgtgatggcggaacttatgattttttttttgggggccattttcagcatttgcggctactaacattgcatttattcaaggctatcttttttttttaacgaatgggtaagttgccaatttcattgaactagtaagatagcccgcgcattcgcgcgggcatgtatcgtgggctgcgttgagaataaatcatattaattagatagcctatgccatctttcagaagtacgttttctcgacaaatattcttggtcaacatcaccttgataatttctctaagttatatactatataatattcaattcatcatcagtataaccaattatctataatctttatcattatataaaaaatagtagacttagtttgtttaaaacatatttaacaaattaactgaatattaaaaccagggtggttttattttcattagttttgggggttggtgaaaaagtaagacatagctaaactcattgttcattttcccctaccgtacggttttctcacagctcctagtcgttgtgtcctacaactgagatgtggttgttgcacctatggaggtttccttgtgatttatcatagtggtgatctcattttttgtcaagcttagttagtcacttttcatgtttttggtatatcctaaagtctaaatggactccaaagttaatgcttcaagtgtatattcatagaccattaatgctcatatagttgattcaccttttgaatggtctatgcacaaagaaaataaacagagttaccgggaaggtgtagaaagccataaccacacgaaatgttaattcgatggtaacatagtttagagcaaatacacgaaagatcatttagcttgcttgcattatttcagcacatttaaaaaaaattcacgaaataattggagtttgttttctctaactatgggcattggatttgctatgcattggtagcttggactatttacttagatagtgtttatctaatttagctatgcaagtttgcaaaaacaacatatgatgatgtaacctgtgttgttggattatttcataattcttttatggcaattccaatgacatgtaaaagggcaggggtgttcaccctaaaaaaatagttttatagttatactattgatttaatttagcttgtttgcagactggtgtataatgacataatatatgcagccaatttgtttaaagtatttcaattttatttgtatgatatacaaagcatgtgggtcgaatatgggcgaatgacatactttgtatataagaaaatataagcatacggatcttaaattcttggtttaattataaatagagcaaaaatcagacgtgcaccttaaatattatggtttttctaatatataaattattgattatatatttattgtttaatagctaaaaatagggaggggacatgtagtggtatgtgcatatgagtaggcgaggaggtgcatgcgatttatttttctaacatttataaataatggaacttaaaactgacgctgataggtttcattttgttcagaatttataagattatttctgatttttaggacatgacacatggcgagtttagagcgtttgtagaatgccacgtggtgacttgagaacgtttgtagtgatagatagattggttcaatttacactatatggagattttctattttctatgttattttatacaaatcttattttcagttcaaattttactatgtgatacatagtgatagtgttacaccttatgtgtcatttttttaaaaataaatccaataatcttttatctttaagcagtaagattgatatagattatcattgtttattaacagataaattatatgggatatgaggctacagatagattgagatagatccaattaatggatttaccgttttgagttatctatatttaaacataaatataatcttcgtgaaccaaaataatatatttcttctactacttattatttaaatcttactaattaattatccgtgtttcatgatgttctaatataagctacgtgctatcaatcaagtgttttaaactctatataatttccctaaaaattgtgtctcgagtgttcaatagctagtccaaagtaacatatttcttttactcgttaaatatagttaatttgggtcttgaattatgcaacaaacgtacgtgcagtgcataaaaaatagttatatgattttagattgtatagtcatataatatgttttcaatctaccacatcaccaaaataggagagataggaacagaagggtcatcaaaataagagagaaagaaacagaaagaaaggaggggccaatacatccacatacgtgcgtatggtggcatggcgtgcgtactacacgtacaggtcggaaaggagaggaatgtgggcctttcaatttttttattttttatggtagaaagtaatgggtccaccatatttaaaggaaaataaatctaatttattagagtgccatgtgacagtttaggagcgtttgtaggagttctatgtggcggcttaagagtgtttgtaggaagtttaatggacttttagtatataatagatagatagaagatagggtaggattaaactttacaagtgtgaaaaaaacaagactcaggaccttcggtccgagcaattaaaaagaaatccaactaccgagttctctcgcgcctaccaaggaccacgattttgattttagacagaaggctacccatttagagctccttttgctgaaaggttctgcggcagattcaaggctatcttgtacacttagaaatggtttaatttatatatttacaacgcgtactttgatctggagcttaatttctggccctcttctttgcgacggatcaggatcgtgggtccactgcagaggatctcagtccctttgcgatatcccccaccaccaccacaacacacacacggcgcgtctcacacaatatgtggaaaatacctacatggttttaaatttaaaaaatccattttttttctcaaacaattttatttgaccgcttaacccttaaattatttaaaatggctcattttacttcctaataacatttctctttttattattctctttatagtacaattttatagagccatagatgtcactgtaatcaatgttcaaaaatatttttaattttttttcactataatgcctgcaatttcgttttcttcctcttttaattgtaacgtctgcaattatttacacctacgtggatcatcttttagcaacaaatttgcaaaataagtgtatttatgtagataaaatgtactacatgacacttaaaaaatgttatttttcacaaagagacaccacattatgtgacttcgcaaaaagaggtgggcaactaaataatccctaaacactgttcctgatgcgaaattcaatctgtattttgttgaataagggccatttttcgcgaacgcaaataagggctattttggtttgataaaaaagtgccttaccaatttattggtaatttgaatagcaatactgtatatttggcttaaagccaaatcgttgacaatgccaatgatcaatttggcattaatattgaactttcctctccgtatcatcaaatatttagtttcatattggtatcaatctaaatatgtgtaatacattatacatctctatccatcaaaatattgatagtgtcaaaatttgccaaaaatttaacaccaccaaagatttagtagggtagagaaccaaacaactcggaagcaccactaatttcacttgacatgagatgcagatgttctcagctgcaatatcttaagccttttcaatgtgaccgctaattctttgtgccagactgccaatctaaccaaacgcatcaattaataagggttagaattgccgagtcattgtctgttgcttaatttacccctttgctagtagtagacacgggaggacaaagtttgcctctttgcattaatttacatttcaaagatggccaattagcaggagtaattcggttccaaacttttcaattgacatcctctaacgtaaaattagattagcatggttactgatatttgagacccatcacttacaggcccatgtatcagtgaccacatcagttaaagacattctgtcagaggaacaactctatcccaaactttcaatgcacaattgttcttgtgtagacgtcactgtacctgtatctctctaggatcatcaatcgatgcttaattaatcagaactaccatgatggcatgatgtacgacaatcacttctcatgtcagttattacggagtcacaccggcggcaacgtgtcagccggtagctgctgcgccgccgccgcggcggtggccgtcgacgtggctgtggctttcaccacgatggtcgccggcggcgagacgttgcaccggcagagcgggcacgtggagtgcgagtgcagccacatgtcgatgcagcccacgtggaacaggtgcctgcacgccggcagctgccgcaccatctcgccggcctggacgtcctccaggcacaccgagcacagcgcgcacctccccgacttgcttccgccgccgccgccgtcgtcggccgcagggcgcgcgtacgcgaacgccgggagcgcgtcgatcgccgcgccgacgagcccgcacgtcgcgcacgccgccgccgcgggcgccctcgcccgcgcctcctccgccgccgctgctgtcgtcggcagcgccgccggagccccgccggcatccccgcaccaccgcgagacgcagccgacggcgcagaacagcaccgcggccgccgcggcgaacacgcacgccttggcgatgctcaccgtggcggcgagcaccgacagcagcagcagcgacgcgcagaccatgacgacggagtagcacgcgaggtacccaccatccccgccgcgctggctcgccgccgggcgccgttcgccgttaaacatctgcagccttcagctgaatcacgagctctgagcagtgagcgcgtagtacgccatggagcgggcgctctcggtggcaagaaatacccggtcgtggcgcgccgggtgcgcgctctcggcgtcggcgtcggccccgcggcgcggccggttttaaggtttctggcccgaggtattcgcggctgatgggccgcagatttggtcggcggcgttaaggaatcgtggtttagattcttggctgatcgcctaatcgagggataatgatagtttgggaggtgatcattgatgacacgtaggaaggccactacttgtggtagccactagagtccacatacaggtccaacacgacaggtccattggtcgttgagatattttccccaataggctatcagcaaaattgcataatccacctagaaaatcactttcgttttaagattttgtccaataacccatttttttgttactgaagctcaccatccaacacatgtaagtagctgatttaggcccattttattctgatgtggattcacaacggatcatatcagacacgtctggctcatccagcgtggctatgatgtgagtctcactcaagctcgttctcaggctagcttggtgggaagacgtgggttgaacgctgagctgatcgaacggcggtgattggcggcaaatccacattggaataaatgacatgaatcaactaactactatgtgcatgaaaggggctaatttcgcctcgacagtgttggataggtagacttttaatcaaaatgagttacgcggtgaaatcttaaaactagagtgataattaaaatggtctatgcaattttgttaggctatttagcgaacgtccgccggttagtcccttatagcagtggacacgcttcatgatggttaggttttttttttttttttactttacaacgattttagataattgttgtcaagatttaagagtccgtagctatataataaaaaaataacagttaaaagatagaaattccagctttttaaaactttgtcactaactgctccttgaaatttccagctctcaaaagacatagattttgtttccactggaaaccaaatcatgatgaagtgttttgtaaccttgcataacgaagctcttttctgttttccttttagaaagttcgagattgtggtgcccgctggttctatgtagattacatctttgcgtgcttgatcctctcacgtgctcaatttatgtaaaagaatgacaactagtaaaattgttattattataacatagcactatgaccatgctactaaccttcgattgacacatcaaaatgtagcttctcttgctctattttgttgaattattagggtgtataaactaataaaatggtcagtaggtgtgtgcctttagacttcccagcaggtttacaaaaccgatcataatcacgcagtaatcactatgtatggtaacggtaaaaccataataaccctatcaaatttaaataaatttataaaataatataaattgttataaattttgtatgattactcacgttttgcatggttactgtatggtagctgcactaaccgtcaaggtatggtaaactcgtgacaataagggaagcctgcttcattgacatagtgctgaggtcaacatattttaagaaattactatgtttatcaagaaaagtactacattttcttaaaaaagtttatccatatatttcctttgtagtgtgataactttgcttgcttgagcttcccacgtgctcaatttaggtaacatgaaaattgtaagtatttatgtggttgaaatgagacatataaaaattaactagttgttacactcacctttgtgtgcttaacaaattgtcaaaattacgccgataataaatatatccaacactatcaaaatttaataatgtcaaaatgggttaaaacttaacattatcaaattttaatagggttggaagtggctaccgagtgaagaagccctttgattcacctagtgaactaccttaaaatgtacagcaccaaactacaaatactctgaaaaatatatacaacaatttactgaaaataaatgagaaagaaaagtagtttttgttcttttttctatcaatgatcacagctacaagctcctatcctgaatagtcctcttgagaatatacagaaatcacacgacacaaccaatttggcctgcaaatacgcatgacaatcaattcccctgttctaacactacaatgtacaatccaagattccttctttcctatcgaaaacgaaggcgaaagctacaccggcggcaacgcatcgggatctgcatacgccgacgtcgattcggcggcttgcgccggcggcggcggggcaggtttcgccgccggtttccgcggcaagacctcgcagcggcagagcgggcaggtggtgtgcgagtgcagccacatgtcgacgcagtccctgtggaagaggtggccgcacgccggcagccgccgcaccgtctcgccgcgcgccacgtcctccaggcacaccgcgcacagcacgctgccgccgtgcttgctcccgccgcctccgccggcgccgccctccgcggggccctcgaacacgaacgccggcagcgtggcgatcagcgccgcgccgacgagccggcacgcgcaccgcgtcacccccgcggcgcccgctccccgccccccgccccccgcggcggcgccggcgcgcgcgggcgggccccccgcgccgcacagcggcacgaaccacccgatcacgccgaacagcagcacggcgagccccgccacggcgcaggccttggtgacgctgaccgacgccgcgagcacgcagaacaggagcagcgacacgcacgccacggagaccccgtagcacgcccggcactcgtaatcatcatctcccccgccgctgccaccgcccaccctcgccgccgagcgccgggccgccgcgacaccgctcatgataacgcagctcagctgacaccttcacagtaacaagcaaaacagtagcagcgacgctcggcttgctctcgtcatgggggcgcgcgcggcgggggaagatataggttggcgctggcgcgggggggaacggattggggtgtcggggtacagcggccggagttagttaggggaggtgggaaccgggagcgcgcggggtggtggtggtggtttgggcacagccgcacaaggtttaggggtggggtggggtggggtgggttttccgcttaccggatgacggcgatggccgcagttttggactagggaggaatgtgtcgcggaatgcagtgcctgtgtcgggccgtcgggacgggagcgcgacggtttcgtgtcgggatgtggcgctgatggtctggtcctggtggttatctgcagttgggtgatgtcggcgcgacggcggcggggcgggggatcgtgcgtgtcaggtgtacacaagcgtgtttttttttcgctaatcagccgttgccaaaatttaaaaggagtttaactggtttttttttattttggaatcagactaactgggtttatattttagatttgacaggtgctcgtatttacggctaattattttttttagtgatagatgacggatccatcgacagcgacacacttatggtgacttcgttaatatcaaaaatatgtcggtcagtctttcggagatgtttataggggtgagtatgcacatgttgtaaacgtatgtctttgtactatgtttcttaaaaaaaaaaaagctgtacaattcattatcaacatttggccaattgttggggctgaggatttggtaccttcggttttggttaggattttcacttcggatacatcaagtgatgggacacgatttgattacgtgacgagcagttccaatatactgttatagggttaaattaaggtttttaattaaaagaggaactctatacaacattcgaaagcacaaatatcttggttgatcttcttaattttggataggcgttgttgggcgtgggtgaggattttcttttgagtagtattgaatgatattgacggctgtccattggattaagctaaactattggccttagagggagttaggctacgtacaatacattgacgacagggtatagtagtagttagcactgcggcaaatatatgttagtccagttagctgcaagctataaaaactatcaaatcccttccaccatcagataactgaacaagtgaactttagtaacacataaccataacttttatacttattttgttacataacactgacaattttatttttccctattttgatgtcaaatacagtattgattttattcttgttttttaggtttttatttttgcccctagttatttgaaacgaaggaggcacctatcctgtttttgacggaagttagtgcatgttgaattgttgagctaaaacaatcgaaaaaggaaataataattttgcaattttctgattgacctctgtacccctagtgaaagaagaaagaagggaccaatgtggtcaaccggctttgacgctatttccctgttaccgaccctagagaggcgatggcggcgactcatccaggcagcagcagggagcatgcttcagcggcggcaatgactctgtaggtgagtaggagcaggcaatgccacagcagtggcgacccagtgaggtgacggggagcaaaaggcgtggcagcgagtagtcacctggcgtggtggtggggagtaggcggacgcggcggtgattccacctgttggcgggagcaaacggccgcggcgactaccctatgcgaggagtaggctatgatggcagctgcttggcaaggtggcagggaggaggcaacgatcacagtggttcgacgtggagaggaggcaatggcgaggaggagacatcagcagcggctcgatgtggggcggaggcggtagcggtggctactatgctaggcggtggggatgaagccatgacggtggcggctcagcgccaagaggaggtgacggcgttagcggttcgaccaggtgactggaaggaggcaactacgacgacttggtgcaggtaggaggagacgacaatggcagctcctctgccaggtggtgggagaggacaacaacagtggtgtctcatgtagagaggagacgacgatgacgacggcttgactaggcggtggcgagctggaggtcgcagcgccacgaggtgaaggccgatggtgagcaggcggcaggggaggagaaccaagctgcggggtcctgctccggccgagatcccgagacacctacgccctacaaggtttcaccctatatgttaagaagagtgtgaaaacacagaagatttatatcttcaaaatattaagagtgtgaagatgtacaagatttacatcttatagatatctacacctacaccttcatgatgaggataaacttataaaattacatccattgtaaactctttcattaataatgtctctgagaagcttgtttaaaataacgaagacttccatcactaagcatggaagtgcgcttatggaccgggctctagcagggtcctggagcacatcccgggaccgggggagcctggaaactctatagttcagggtaactaaacaaatgatttttaagacatcatcttcctaactgaatgaaataaagtaataattaatacaagctaactccaaacctaaccgctacatgtaaaatactaacactttgctaataacagattaattcatttgctaatattcatgtaaaaatatttatttgctaataatgcctgcctgaatttcaattatacttgcttgggcaagcaagcacctgcgtgataccaaccttgtaataaatttttcgtttgttgtcagtttctgcatattagttacgcatatttgatgaaaacaaaacaatgaacacacagaaaataggaaaaccctgtattttattaatcatgattcattaacatgaatatttacaaatacatgagggctcccgcaggagttcgccttttgccttcgtgaggaatgcttaatagaaaggtatgttgactggagattgcgtgcagtccacttattcccgacgcctagcaatgaggcagctggttaattgcatccataagacaagcctatggaacacctccgattaagctgcgctttgtgatcgtcgtcttcaaaattaattgctcgccgaaggttgaggttggtgcagatttaacggcgaatatagtaaatgtggaacaggtggctttgtttcgccaaaacccgatcatagtacaccaccatcacgtcggtgtacggagggaatttggtgaagcgaatgacctttgcctcgtcggtgcccagtcatgtatcccggtcttcatcaattatggaatatgtggttgcctttgcctcgtcggtgcccagcaacggtgtatccggttcccatccagtttggatgtgttaatagtatagtgacctagcattgtcgatactcggccatggtttcatctagcctcgtcggtaatacataaatagaatgagtaaatggctgtagccttgttagctttagctaatatgtcgtttggcctcgtcggtttcggatacaacgccttcgtagttggcgtatgtatgagtcaagcacagctccaccagtgcatatgcatgggtcaaaatatattttaattatgaaaacaacgcctagacaatccgatcgccaatgagggccgggtatatctagtaccattgttattggtatcatagtaactgatagaagatctgatctccaaatgagggctggacgtctagttttaatcatagaaaatatcaaatggcactcagatgatccaatcactaatgagggccggaccatcctaatgccattgattatataaatgcagtccgatcatagtcatttttcggctctcatcgatttgactttaatcatcgagatagattaagaatatgtagacggtccgatcactaataaggatcgaccatctgccatgtttaatatagaaaattaatgtgctcaccgtccagcccaaatgtgttgactagcggcatgttgtcgatgatgaagcggcttgacgaaagacgctagcctgcgctggcaggcattgtcttctgatcctaatctatgagtgatatgagatagagagtcaatgaaaataatagttgggtgcctcctgtggctgtcttccgcgtgtccagctccagatggggtatgtgcagcaaaggggttggaaaccacatccgaatttccagcacgggatgttgaaatcatgcgttaattctcttgataagccgatgctcagatgagctaatccatcgacgtgctggagataaaaccaaacacacgtactagagtttggagataatcatgagattgtctctgctaatgacagtggccccacctttaatttagttggaagtgcatcggattgattgctaccaacaaatcaatataatctatacgtagtactagtcaatctcctttgtttgaacagctcaaatcttcaaaccatgtattaaatttgaaatctatttgcaccactattttctattaaacatatgcagcgaaacgagtccaatattgattatatttggacatcgtatgatatttgaattttctggtcccacatcatagagacacgcttcacgtctattttgtaaaattgactgtaaattagtgctcaatgatttattatcttttctatgaattttggtacaaaaattcgtcaaacaacgcaaaatataagttttatgtagctttgtgtgcaacacaaaatactatgagatcattatctgattcagactatgtttctcatacaacacgagacagagattatgtcatattcagacaacgtttactgcacaatgtaagacaatatggagatatattgccttctatcgtgtttttgagatgtacagcttattattttttaaaagatcatgctagaaattttttacacgatgtgtttgaccgcttccatacctataacaataacactcatacatatagagagtacgtatgtgtaattaaaataatcttcgcctgttgaaatgcacagacatttctttctagtttatatgaaaatgcaagttatggaaaaatattaaatgtaaatcaagatattattatttaaacattttgaatgattatgtcactaatatctctgtcttaaataaattatgttagttgtttaaaaccattaagattgttattattgtttggcatgtctcattttagactttgtatattattgtaaatgaaaataaataaaaagactaaattatactatgccttaccacaatgccatattgtcatggatgatcccgtatatatatcggtaaataatcgttggattggttccaagtgacataccatgctatgcaatgcactccataagcaattgcatattctgataaacaattctgactctaaatatatactaactctttttttagataatggaattacttccggcctttgctcaacatgctacaactaattattacactaaatcttccgacacttgggctgagtttattggcaaccatttccttgtacagctcagcccgacgcttttaaataggcctagtcctgaatccatttcttggtcttttaaaattctgtacaaatattctcaatttttaaagcatcctaacaataataaacaaaataattcaacatagattttcttagaatgtgcagaacgtgtcatcatttctaacccaatgaacaccctattgtttttacatatctacaccggtggcaaggcgtcatcagccggcggtgatgtctccgccgccgtggtctcttccatggccacgtcccggggcggcgagaggtcgcaccggcacatcgggcaagtccggtgcgagtgcagccacatgtcgatgcactccacatggaacaggtgcttgcacgacggcatctcccgcaccatctcgccggcgtgcagctcctccaggcacatcgagcatggctcgccgttcccggcctcaaggtcgccgccgccgctgtcgccctacgccaccagacgtgtacattggtagcacgtccactgcggccttcttgagcccaaacgggttggaagaagttcccggcggaaaagaggaccaaccgatgaagctataagaaacacatgattttaatgttgatatttttatgttgattttaagaaaacttaattttattttgaaaagaggaccaagaaactaatgctcaagaggtacgcactacttatgatgtgtttctgtttgtacatatcattactgctgctatatccatgtcttgttgcgtattacatgttgataagaaaaaaaaattactgctttttttgttactgccaaaattacgtctcttcactgcaataacttatgcgtgttactaagcacaagatacgcgttcgagtaacaactagtgtggtcttcaccttgtttaaggaaacattgtttgacaacattcctagtgaatgaggtttcaggcgccatgggagcctacatggtgacccatggtaagaacctgtggtcacaacatgctttccaggttactgcggatctggagtctgggctatatgaatgcgagtgcaaaacatggatcacacaagtgtgtgctcgttccagatttattattgcaaatgtccagtcatgttactgctgttatactctccgttactgtgactaccatgttgcaggccgcccacatgttgcgagggtgctctgccatctccaggtagaaaacataccaccaagatatgtattgaagaggtacccgagaagttctaggtagaagggataccaccaagatatatattaaagaggtacacaagaagtgtcaagcaatggttgtctttgatgagcacgactacaggagatttggcttgacaacacaagcgagatatacggtcacattgtattggtcaataagactattaaagttgttagaaaggcatcaaaatcaatgcaaagctacgataggaccatggaggtgttgaaggagttggatattaatgggatgtcacgtgaacaattattaaacaatgaaaaatcgaaacaagctgagcacaagcagccgaaagactacagcaaaaggtgcagtgtctgtcagaaaattaaaggacataatattaaaacatgtcctagtagaagcaaaagacaattgactttgaattatctcgtattcagttgatcaggttgtattcagttgattaggttgcttgattaatttagttgtgtggcaaagatgtaactcgctactgcaccttttagattgcaaccaaacacaggaaagtaaaaaaaacgcttaaaaatgattaaccaaacaaataagaaaatggatacattgtaatcacttgatgttgcaaccgtttttcataccgtttacgttatcgtgtcctaaccaaacgccacattataagcattccatataaagtgttattaatatattgtgtactaatcaaacattaccttataaggattctatatggattgttattagcatattttgtactcattaatacttaaaacgtgtaacatttaagggattggtgtacactactcacagtttaaagaggtcaaatatatgctcaaatcgtacaacaatatatctaaacattttgactaattataccactaatatctatgtcttaaataaattatgttaattgtttaaaatcattaaaattattgctattatttgacatatcatgttttaaactttatatattattgcaaatgaaaatttataaaacaactaaattttactataccttaccactatgtcatattgtcatggaggaacccgtatatatattcctaaataatcattggatttgttccaagtgacggaccatacaatgcactccataagcaattgcatattctgataaataatactgactctaaaataaccgttttgaagactgtcttatgtaaatatgtagagcaattctacagtccttgaggaggtaccatgaggtaggggtggataaaaagctcgggctcgtgagcttggctcgggcttggcttgagctcgtaaagcttggctcggcttgaaaactaaacgagccgagctcgagctgcctccatggctcgcttctaaatcgagccgagcccaagctgctcgcaagccgctcgtgaagcttgacgagcttgtgcaaaaaaatggcctggcccattaacagctgatttggcccatgaaaaaccctaacctcaccgttcctctcccactcccttgtcatttcctttcctagaccccttctcacgccgccagcccgtcacaccgagtccaccgcctttcaacgcgcgcgcgcgacaggcgacaccgctcgaggcctagggcgcgaccgcgtgaggctccctgcgccgcctccctcccctgtgctttcctccccagcaccactcgacgctccctgcgccgaccttccctgactcgatgttgttcatcacctcgccgagacaccaacccaccgacggcagttttcgctgcgatgagcccaggatgaagatgttttgggatgtgttttcttatttttcttatgcatgtagcaatagcatgttgtggtctgtgcacttgtggtctattggtcttgtgattgtggagcaatagtacgtgtagtatgtgcgtgatgaattgatgacagaaagattaaggcaaataaatcaaaattgtcataccagtagtgtatgtatgatgtatctgtgactctgtgttactgttagtgctatacttcactcttttttagttgttcttgctactgcattgcaatttgcattatttgaggcctacatgacctgtaggagtttgatcctgatgcatacttaacgtttacttgttgaaaattgattgctttgttgttgtagtgtttacttactgctagcatcacaagccggctcgagctggctcgagctttgaaacgagccgagccaagctgctgttttagttcgtttagttaatcaagccgagccaatctaagcatgttctttgccaagctttcacgagccgaaccaagcttggctcggcttgcctcatttccacccctaccatgaggtaccaaaattttggtacctcatagtacctaggtaccatgaggtaccaaatttacaatagaaaaaatggtacttcatggtaccttcttaaggaccgtaaaattgctcaaatatgtaactcttgtaacttataaaccattctacttcctccgtttcacaatgtaagtcattctagtatttcccacattcatattgatgttaatgaatctagatagatatatatgtctagattcattaacatcaatatgaatgtgggaaatactagaatgacttacattgtgaaatggagggagtactatctttgtcccaaaataattataattctaagttatttaactaatattaaggtttgagaagaaaaactatgatgttcctcattaaatgatgtataggtaaaaactgaagagtggttgagagtagaataagaaaaaattcgaataataagttattgatgagacaattagtactttactatgacaattatttgagacaaatttaaattctataaatataattattacggaacggaggtagtagaattttctaagatgtgcttttcttaattgtcaacatgtggttaattgtgagtggatgagctattacatccatccctctctccacttgattgcaactgtagaacaacacagcatggaaggagatacgagccatgtgactagtacaaaataatgtaattacaccataatgactaaaagaaagaaaaatcgtcaacttgggctaagtttattggcaaacatttcattgtccagcccagcccaacgcttttgaataggcctagtcctgaatccatttcttagtcttttaatagggaaaagtacacgcaaggtccctcaacttgtcagcgagatacaaaatcatccctgaaccgcaaaaccggacatccgacgtcccccaacttacaaaaccggtcacaaaaggtccctcggcggttttgaccccggttttgtcccacgtggcggctgactcagcgtgggacccacgtgggccccctctctctctcttctctttccctcctctcccttcctcctctctctctctctctcacttatctgcaaagctagccggggcgagcaggagaggaggagggtggcgccgcgacggcgacggcggcggcggcggccgtagtggggaagcatggcggaggcgcggggaggccggaaccctgccgacgacggcgagcccgtagcccttgagcccgacgaactttgctacctgggcaccgatgccgtactcgcgggagtcgacggcgaagccgagctcgacgttggcctggacggtgtcgtggccatcgtctaggaggttgtaggcgcggtggccgtgcgaccaggggagcaaggtgtcggcgacaggcgcggccttgacctcgccacggcgcgcagcctcaatggcgtccgcgtggccgacgagatcctgcggcttgtcccggacgccgacgtgttccacaccacgctgcggtgcgtgaaggaatcgacaagctgctcagaggattcgacggcgccgcgtcgtcgcatcatccgtcgttgtcttgcagccagcaaggagccgcggcggcagcaggaacgggaggccgtctccgccgcggccgcctcgacgccgaggatctccgggtggcgcggccgacggggaaggagcggcggagaggagatcgaccggccggctccccacccggcgaacgcgagcgcgagcgcgaggttcgtgctgggcggcgacgcggcggcggagacacgggacagcaagctcggcggcggcaggcgagcgcagctgcggatggggagcggcggcgccgacgactccgcgccgctcggcctcatcgtcgtcggcggctctgggcgcgggcggaggtctcctctgataggcgatggcggccgcggtcaccgcgccattgtacgcggcgggggcgtcgcgccgccttgcttctcgtcgctcgtccgccatcaccgaccgcacgagggggacgaggaggccgtcgagctcgcgccgccctgaacccgcgcgccgccaccggggagccgccgtcgccggccgcaccaccctccggctgcacgcgccgccgcctgtgcgacagcaaagagcgagaggaaggaaggagagagagaggagaaaaagagagagggtgctgacgtggtctccatgacatgtggggtccatgtgggtcccatgctgagtcagccgccacgtgggatacaaccggagtcaaaaccgccgagggaccttttgtgaccggttttgtaaattgggggacgccggatgtccggttttgcggtccaaggacgattttgtatctcgctaacaagttgagggaccttgcgtgtacttttccccttttaatatagcaaaatctgctatataacatctacaaattgtgtaactggttgtaggacaccgtaaaattgtgtcactgctaaagaacacaataaaaatggtataattggttgcaagataccgaacacattattttataattttcaggacaaagtggagagagaatgtttttaaaaatacaagtttacccctgctttccctttctccccttgtctggctggctatgaggaggcgatcgcggcttcgactgtggcgagtggcagtgcaagcaggcagcagcccactgcgatgcgtggcccgctcagagggacgtcagccacctgagcaagagcaacagcccagcgttgggcctgtaactcggtagcggccgaggaggaggaacgaccaacgcaacggcacatcgtggtggctgccaatggccatattgctatcctggagccatcgctgatcccgagcatgctcgacaatgcggcggacgcagctatgaaaacggccgtggccctacgcattgcgtgtcattatattgctgttcatcggcgtggcggtgaagagggagtatgggggaggagatcgacggtgagagggtgtcgtcggcggacggttgggcgagcaggacgacaacgactacggcagcatccgcaataagctccagtatgtttgttcatctgcatagcacggtcaacctggtacatcacatatttccacgtgtgattgttacattgtattgatttgtatttgttcatcttttgttgattgaatacatgcgaatcactaaactatcgctttgtttcttcgagcagaagcagaatgtccatttagggtttgtttggttcccggtcaaggttggatgggagatgacggtccatattttgctggatatgaagatccagttttctgtttggtggagtggatatggtgatctattttttttgtaaggataaaggtggatttagtgatccatttttctgtttggctgggggagtagtatggatgagtggctacaatcacattttcattagagatggttagtataccccttcaaatcaccaaacccaaaaaaatatcaatctagtacaagcaaaaaaatctatataacataaaaattcagaaagaaataaaatggggaaaggagaaaaaaggaaaaaaaaagtggtcctcttcgccaaccgccgccgcgctcctctcctgctggccgccgcctcgtctcctctagatccggttgtcgttgtcatcaatgttgtctcggtcatcgtagtcgtctcttgccaggtcgtcattgttgttatcgtcgtcaagttctggtcgtcgtcatcctagtcggcggcggtgattcattctcctccgggctcgccaccgtcccttcttcccgttgccgccgtctctagccttcgggctggccgccaccccttctttccgctgccgccgcctccaaccttcgggctcgctgccccccttctttccgctgccgccaccacactcgcacccacttgccggcagccgagcttgcatcccactgcctccctcgcgtcgtcgttgttctcgcatggtgagaggggtgacgtgacccacctcgtcgctcgccccgctcgcccgagcgctcgggcggctgtatccgggcaaatcggccggattaatccatccatcatctagggggaatattcccctctgggctatcctatcctactcccgcccaccaaccaaacaccgataaaaaaatggaacgccatatcctatccgcccaaaaccctccatccaactgaagctcggactaaggcaggggcaaacttgtcttttttaaatttctctcctccttttacttaaaaattataaaataatgactgtagtgccctatagccaattacattatttttgtggtgtttctcggcaatgacacgattttacgttatccctcagctaattacacaaattttgaatgtcccacgacaaattttgcctctaatattctgcacaaatattctcaattttcaaaaattcctaaatgtacaaaaagaaacaaaataattcaacacagcatttttttgtataatgtgcagaaggttcctaaatgtacaaaaagaaacaaaataattcaacacagcatttttttgtataatgtgcagaaggtgctatcatttctagcccaaatgaacacctactctgtttttacgcatcatctacaccggcggcaaggcgtcatcacccggcggcgccgccgtctccgccgccgtggcctctttcgcggccacttcccggggcggcgagaggtcgcaccggcacatcgggcaagtccggtgcgagtgcagccacatgtcgatgcactccacgtggaacaggtgcttgcacgccggcatctcccgcactatctcgccggcatgcagctcctccaggcacaccgagcacggctcgccgttcccggcctcgaggtcgccgccgccctgcgcggcgccagcgccaccggacgcgtacgcgaacgtcggcagcgcgtccaccgcggccttctcgagcccgaacgtgctggaggaagaagctcccggctgagcctcccgctccgcggcgcgggtgttcgtcccgccgcggcggcggcaccagctcgccggcgcgaggtagtcggcgacgccgaaggccagtagcaccatcccggcgagcacggacgccttccagacgctgccgacgacggcgagcacgcagaacagcagcaccgccgcgaaggacgccgcgatgccgtagcatgcgcggcggccgcggccgccgccccgctcctcctcgccgccgccccgcagcgtcgccgccgatatcctcgcgaacacgttcgacatgatcgccggtcgccgccgtcgctggtcaggtggtgcgcttgcgcggcgaatgatataggaagccggcggcgtgcgaggtcgtgaatttgaaggtcgcggcggcggcggcggcggcggcgtggcacacaaaaccggtggcctttttgacgggaaaagcgtgtgtttgtttccggtcaagtttatcgcgcccgccattggctatttttttggcttagagagagaaaaatggaagatatgaattctaagtttccatctgttcgttgacggcacggtggaattaaaggaaagctacgtcgtcgtccctgcagaccgcagtagaaaaatcgggcaagatgcgtggtcaacaagagcgcaatgcatttgaaatcgttttctctcagtttggcatcgttttctcagtttggacagaattgtgctaaatttgtgttgagatgactcaactgaattacagtagttagagtactgaatttccagcttcggatcgcttacctgtttgtaaaatgttctatttctttcgtctaaacaaacgggagttaattttctcggcaaattcgcatcattgtaatgaacttatcgtgtctcctttttgacactctgtaagctttctacccattttcttaggcagagctcctactgcttctggttaacaaaacctatgtacaaaacaacagtgatatgattaacaacatatttgaattttgaagaatagaaatactgttcgatcaatggcacaaactaattacaattcacaacagacgtacactgtaaatttctctgcaagcttaattaggccaatgcaaataatcgaccatataatatactctcttatatttacactcacacgtgcaacagctggtagctacaccggtggcagaacgtcgtcggccgtcgactccggcgacaccaccacctccgccgcggccttcgctgccgccctcgccggcggcgacaccacgcaccggcacatcgggcacgtccggtgcggcgagtgcagccacatgtcgatgcactccacgtggaacaggtgcccgcacgccggcagccgtcgcaccgtctcgccgccgcgcacgtcctccaggcacaccgcgcacaccgcgcagctccccgcggcggcggcggcgccgctctcgagcgggcacccgtgcacgaacgccggcggcgcgttcgccggcgcgcgcgcgagcgcatccgccgccggccgccgccgagcgccggccgcagctcgctccgcctccgcgccgccgcggctccggcgaacccacctcttgggggcgaagcagccgacgacgctgaggaccagcgcggccatggcggcgtacgcgcacgccttccagacgctgacagaagccgccagcgcgcagaacaggaagatggacaggcagacgacggcgatgccgtagaacacgcggaatccgtcgacgtcgtcgccggcggcggcggtggagctcgccgccgacgacctcgggtaccagttgagcatgatgagtcgagacaagtgcaaagatcgtgcaacgtaaacgcaatgctcgatctcgcgattgcctcgagtaaaacttgatcagtaattagtttgcaactaatgtcgccgtggtcgaatgttttttacagctataaatacggtgtttagctacgtggtttggcacaatgtttttagcgtgtcactgctgccatcgtggtcaatttgctaacagctaaattaatcagggaaaattcaggtttacactgagctgtactgtggagttttttatggattaattactttatctggatgatggctacatggatggattaaggttaatccttcttacaacatcgctaatcgagagcttcggggtcgacgtgacgtgtttattccgtggcattgttcagctgccgtctacggaacagacaggtttactgtttatatattttactatcgtctaattaaaggagaaactgtgtgaagctagccacatccattgtggttcatattggaatacccaacccacggaatgaaagttgtaacctttgtagaatagaaataccatcaactattttggggttaattgcatcacattattgcaaatatgccatattagagaaatctcattactattcacaatattggttgggtgttactgtaatattataaaattgaattgacgctatcgtcatcacgtttttcattaggctcttcttacttctcttcttttcttctcctctcctctccttcttcctctatcctcgcattcttctcccttccactggccactgctattgttgctgctgcacctgtgccatcgcgctcgccatgggcctatggcgatgctcaccgccgtggtcgccgcctcgacctcactcctccatgccgctgatggtggtcaccatctcgtgaccgctcttgcaaacaaaccgaggaacacgaactcaaagtcagctgcaaagtgggaggtgaggagaagggaacggacgaaggagcggtgggttggcggcgaagtcctaggtgtacttggagtcctagtaggtggaggtgtcaacgttgtaggaagacttgctgctaccacacgaggcggcggaggcagcggcgccggacatggactcctaggagaggctcatccattggtcgcagatacaccgcgttgccagggctgacgtcgccaccattcgctgcgccaccatatcgccggagccacatcgacctcttcgcagacggcttttgtggagggagcatgggactgggatgacgcgggcaaggagaggggggagggagcagggacttggaggacaacggcggcggtaactccactgccaacgccggtgatcgagaggcacaccttcctcgccggctgctacatttgaaacgagatggagagagatatggaagaaagaagagggaacgatggagaaagaagatggaattgacatgtgggtctcacgtttaggggtattttggtctatatgatgatggaaaacgtgacagtgacaattatttcgaatgacatgaatacgaacagacgaattgtaatgaaaattatcttaatcgacatttttgcaatgacatggatccaattacccctttattttgctttcctaatattagatcttagttacattactctgaagtctcgcctttagattcattcgagaattctgggtagatttgttgttgtaatctaggagggaatggaccatactcgtctcccctgttgttcttgagtcttcgagcctcttcccttgagatgcaatacgcattagcgataacatcaactggtaaggcatggaatactgagtctacccctgcaaggtggctcacgaaggcattagcgtttgtgttgattgcaatatattggcatccttcatgttgtgctttctttaagacaacatagttttgtggaataatcaatagttgttctggacgaagaacaccgtcgaacacagtctttccaaagttactgacgacttggactcgagcacgccctcgaatcacatacatcaaactatgagcatttacattccagaatggtgtgagaatagcattctgcagaggggagtagaaaataatgttccttatatatttcatgaatcagagaacttttcttaatataaagataagagaatgttgctattacaaatacctggtatagatttactctagtagcactcatttggatgatattaaggatagggaatttctgactatcaagacttgtgatccttccagcacgtggatcgtatgaatcagcacgacttggattttcaatgtttaacctcgtcttgattgtgcacaagttctcctctaaaccgttccatcgggaagatgtttgtggtttttcactatattggacttcttggtattgagcttgttcttgttcttgtcgttgtgtcaaagttggtttcagcaattgaaggccattctttacatgtatgatctctcctctttggtcattttggctttgtagcctctttgttgttactgtgttgatgtttaaagcctcacttagtggctcaacactgaatccattgaatatgttttgcccagagtgttgctgaattgagcgaccatacacttgttgtaccctattgttcttaccagccaataagaactcctaaaattatcaatggataattgaaatatgaaacgtagtggaaaaacataaaacaatcatagtttcaataaaaatatatttgtttagaaaagtagttaccctatgccttggttcaagttgattagcgctattgtttatgtcataaacatatagggcaacaacaggcgtgtcaccatcattgtagaaccaatgtgcaacacctgttgggagtacaacgatatcaccttgcctaaattgatgaatcttttggtgctcatctataaacttttggctctgactttcgccttgaaacaaaaactgttgggattgctgctggtaagttgcggggcatccagggaaggttagacccatagaacctcttcctaaaaattataatgtttacattagatgcataaaacataaaaacatattctttttaccgtgaagatcataattgctagtcttattaacaaagttttatagtacattatcattgtacaaaccttggatgatgtagaccatgccaggagtattggcgtatcgaggtattagaaggccttgaggttgaataacacgtcggatgacaaatgtacctgtgcactgaaacaattcattcgtctcatcaaagtactcggtcacaccagcttccgacctcacattctgaagaggctcaaatgcttgtagtctctcaaatctacactccctaaagcttccttgtcgatgagtttgccattggtttgtggctggatcaaatagttgggccatagatccattgcacaagagaagaacacaaaagtatatagaaaatcgagagaaaacggaaatagtcatagcttttgtatatactaataaaacaaagctaattgtgtgaattgaaggatagatcaagctagtttatatagcaaagaaaatgagtttgttacatctatggacaatatcaggcttgtggtgtcaaaattgtatatagggaaaagcaacttttggaattgagttatacatatcatgactcagctatgacatacttcttgtgtttttgggagcttattaagatatgtctagctatctatgtcattgccttgtcaatatatttgtttttcaccataaagctcctatacttgacaagctaagtcttaatttaaataacaaacttgtaagcatgttgtcatttttgcgtggcacactatactttctaagataaacattctttcaaaatagcaaacttgtaggtttgttgtcattttcacatggcatagtatattttcacatggcatattttgtggaggaaattccatctataccactatattttcatgggtaccaagtagtaccacctgagccttgcatctccacaaaatattactgggtgcatttaaaacttctaaatttaccactgtcttatgctcgactataccatcttttactgaactcggatttttgcatgcgcaatcatggagcttggatgaggagcagatctatcaattgacaaatgaggacattgagggggcaacatatatgagaagatgccagagttcatcgagacttagggtaaatgccctcgcgcaccttcatttgttggcctctgcttcgccaccactattgatacagaaatggccacgatggttgtttcaccacatggattagagcttattgcatcccttgtctaaagctcattggtggagtagtagtctattatgaagttgtggctgcggggaggtgattagaagcatatcggagtagatgggacaagtgaccctcaacgagggtgcgttgatgagtaaggattagagaaggagaagtacgaggaagggtattttggtcctcttttaacactgatttttctggtgtatgtggtacaatatcctcttatgccatgtaaaaataaaccagttaagttgacaaaacatatatgtgttagtaattttgacatgctaaaagcctttttatattttcttgactttataacttgtcaatcaaatttctgtaactattttgaaacaattcattttgataattttacaaatcaaaatttgatgtgtccatctattgcaatttggtctttatattttcttatataaaacataacccactaacttgatttaaagattctttcagacatagctgcattattataagttaattatgatgctctctagattaaattatttcttggactttgtgttaatggtgtagttgtgtcttacattttgggttgcagagagtactaacactgatatgttattataagagtgcatttagattatctataacttctatttagttaaatcaaacaactgggtcaaacaactgggatcattatttgaattctataagaatttttaagtatatgtaagcaggtctcgtgttgttttgtactttttttgataaattaagactttaaatttatttatctacacgaagagtcagatttagctcgtcaattgtaataaattaagcgtcaattgtaataaattaagactgttttgtaccacttttagtcacaatctaagaatatttgatcagcttaatcggctcatcttatatggtgactgcaaatgtaaaaatcctagacgaagactgggtcacaaatgtgacttctttttcttctatggaagagattatgctcctctttagcacctctttagcacaactttagatttaagatttttatagaatgtgctcgaaatggggcacaacttgataacatttgaataaatcatcttgttctcatttttttcgaatgggcacaacttcacaaatttataaatctaaatatatgattaacttgataacatttaaataattcattttgttctcaattttatattaaattttaaataactataatttaatatacaaacttcaaatttatcttggatctgagaataaattggagctgttacaaacagcacatatacatatataggcatatattagcaatcaagcagcgcgcgaagtgtatttacaattatcattatacatttgatagtatctcattagaattctaatccagcgaaaagcttaaacggaaggcaatggcggcagcaacgactcgtgcgtcaccagccgtggccgcgggcgcccgctcgccgtgcctcctcgccgcgacgacaggtcggagcggcagagcgggcacgtcgtgcgcgagcgcagccacgcgtcgatgcacgccgcgtggtacaggtgcccgcacgccggcagccaccgcaccgtctcgccgccacggacgtcctcgaggcacaccgagcacgccgggtcgccgccgccgccgcgcgggcgctcgtactccgacgccggcagcgcgtcgatcgccgcggccgtgagcccgcactcggccggcgtgggggctcccgcgcccgcgcgccccactgatctccgcggcgccacgacgcgccagccgatggcgaggagcgcggcggccatggcgacgaacgcgcacgccttccagacgacgacggagacggcgagggcgcagaacacggcgagcgtgccgccgcacgcgccgtcgagaaccccatacccgccgctgccgtcgtcgtcatcgtcgtcgacgccgacgccgacgccggtgctcgccgtgagccgcgagtacaggttgacgagcagcatggtcactcagtgtggagacagagagagcaacgcagagtaattaacgttggtttaacacaaaaccactcgctgcacagctcgttggttggtttaagtacccgtaaattaccatcaggtttacatcatgttgcgcttaatacacatacttaacgaaatagttaaaatgattctgttaatcgcacggcggattaatgttgcaaaacgcgtgtgctgccacggcgtgttgatcgtgtacgtgccgtcgaggcgccggcgaggtcatgacgtgtttatagaattcgtgacgtatctctctttgcaagagtgtgaaagtgaggtgagtgacagcaacagcacacgtaaactctcgagggaatatgcttgttgttgtttgcatttcattaaaattattatgaaaagatttgaaaatttttttgatgaaataaattaatatgtgatagatcactccataaatatacatgattaaatttaactttacaagttgtaaaaaatattgattgtgaatacacgttaactagctatagtttaatttgttcttttcattacaacttattttaacttgcatgtttgtgtagtgttatatcacatgttaatatatctttttatttttttatttgtttttcataattatttggataacatgcaaataacaaggagacaacatgtagtgaatgctatcccaacatttgtaattccgaatggaaaatcataataagatggaagatgaaagaaaaaggacatcatgaactcagttttgttttaattttgttctttgcaaaacaaagtacataaaactattgcaaagcatccacaacaagcttgatgtgctttattatttttgcttgcatagtactcataatctataagttttacatgccgattaaagagaggccttcagttaggaactggtaaccccgctggctcttctgggggaaacgaggagtaaaagggccaatctcatctgccctattattctttagacgtcgggcttcatccctcgagatacgataagcattggcaataacatctacaggcaatgcacgtaatatggagttctttccagcaacccaactcaccgtagggtccgaaattgtctttattgcgacatactggcacccattgtgctcggctttcttaatgacggcatggttttgtggtatgattaatagttgcccctgatgaagtacaccattaaacacagatcttccttgattattggcaacctgtactcgcacacttccttggatgatatacactacactatgggcattaatgttccagaagggtgagagaagagcattctgcagtaagtgggaaaaggtcgggttatgccattatctcaacaacgttacatattatagattttgcaccaaaaaaaatgattgttataatagcattgtaatcatcattacccatattacctggtataagtttactcttgcagcacccattccaataaggttgagaatagggaacttttggttgttaagaagggttatccttccagcacgagggttgtagtagtcagcgcggctaggattttcaatgtttacccttgcctttattgtacagaaattctcgtccaatccattatattgtccttcacgatactggacttgttgatattgacgatgttcttcctgtcgttgtgttaatgtgggtttcaacaattgaagcccgtgcttcactcgaatgatatctcccctttggtcattttgactttggagcctcttggaagcctccgtgtttattccaagggcctcgctaagtacctcagtattgaacccactaaatatattttgtccagagtgttgaaagatggaatgttcaaatatttgttgccctctctggttgttaccagctaataaaaactcctaaacatttgagtaaaaaataaatggaatggcttgctaatgaatgaagtaaatctaaagaaaaagcacaattcagagtattcaaaaatgaacaaagccgattggggaggataatgaatataaaattgataccttctgccttggttcaagctgattagcaaaactttttatgtcataaacatagacaacaacagccggtgtatcaccaccattgtagaaccaatgtgcaacactagccggaagtgcaacaacatccccttgcctaaattcgtgaatcttctggtgctcatctctaaacttatgagcttggtcgctctgtctttgttcaaatagttggaattgttgttggtgtgttgctgggcaaccaggaaaagtcaatcctacgtaaccttttcctgcaataagcacatgtacattactattataaaaaggcaaacatgtgtttcatatttgactgctataaaattgtgatatccatgtgaatatctttgtgccctcacaaaccttggattatgtaggctagagcaggagtgttcgagtatcgaggcaccacaaggccttgtggctcaatcacgcgccgaatgacaaagacaccagcgcatcgaaactgctcatttctctcatcaaagtactctgtgtccccagcttccgatcgtacctttcttaggggctcaaatgcttgtaacctatcaaatctgcactgcctggaagccccttgtcggctttcccatgcatctacaccttggctaaagagcggagccaagagaagagcacagagacaggaagacaatagagaggtagtagttgccatagctatttggagaagttaaaatttgatcgatgtgattgcaagtgcgtaggtggtggtttttatagccaataaaagtggctttgggatccaaggtgcttatgaagtttgttaacctgtggacaaggattgtgtacaatgcaagatttttggtccaaagaagtcactacatcaaaggatgttgttgaaatgattcataccatatactttttgacgtgtttcgtacatgccaaatgtgttcattttctcataaagtttctagccaaatgcattaagtgttcttttgcaacaacaaacttgttagcttctagcatttttgtgtatactctttcttcttttgtactttacaaagttttacaagcaatcaaaaagttgatagacttgtttgtttcttcaacaactttgtaacctgtattaatccatttacttaagcttgaccagttacatcattatctgttgttttcaagcatatcttacttttggtactttttattagctgataaatatttgcgactcttgtatacctacgaggtgtggtcatatctaaaaactttaatggatcatcaaattgtccaaactactaaagtcgcttttagttagattaagtaaacatcaagagaaaaaaaatatatggtttttgttggttagtttgcaattagctcttcgttatacacatctagaccctttatttgagtcttggtgattaaagacaacatagattattaagactaatcatattttctaagtgtgcaaggagagttaggccctcggtagttgaatatgttaccatgatttgtccataaagagaattataatgtgttcttcgatgagcaaagataaagacaatgactctaattgattactagtttggcacaacaaatgagtgtataaatagaatatgacttactttatattcactgtactataaagagtgaaggtagtcatagctcaattcataagagaataggaagtttgctatatttacgctaagtcatgtgtgcggtctcaagaaaatttctatatcctaagaggaataagtggatttgagatgggacaaagtttggatccagatgagttaatttccatagagactcaccaacagttcatcctcactctcaaagaacacactctttaattgtccggtttatgagaaaactatgtggttcatatggttcaatagcatgtgtagtctttctatagaaaaaagataaagccaagcaccagcttccagttttctaagccacttagctaacaaggttatgatgcctttgcattctcttctttgtatacacctgtgtattcttccatattatcctctagggctcctaggtttgtgcaggcgaagcgtagtgtaatcgtttgaattaatatattcactctaataaaaaaacaaaagtggagtggacgaaaaatcgctgagcactgaaagactgaacaaaaccaagccgaactgacctgatgtatcgatttcttcagtcttcagtgccctctttggcttttgtttttggctagattggtcttcgggtttctgttcggttgttgcccaagaaatcaaacaaaccaaaaaattcgagatgtcagcttacctccattacttctatgcttcccaccttctatatcttttggatttttattctatctttggcccaaggcccaatacaagattaaacttagggtccaaaagcaaaacatgtgtattatatcgcatgatgcaatgagatgctgagagaggtgggtggaggatcggtgtagcacattcatgcatgaccaagtgtttggtaggaaaactagagaaaaaaccaaaccgggttgctttcgtttattcggcttggtttctatttccctttcaacttcttctgtttgtattattactgagcaaaagttctaataaaccaagaaaaccaaatgcccacccccttcttaatccggatgggtttttttaaccatgcatgctcatgtatatacatcttttcaataaattatacaaatgtccctttcttttctacacgattgaaaacaactgattatattggacaaaatactcaacccagtgccaacatataactattcccaaaatttactgtgtcaaagtgaaacgatgagatcatcgacactatatgatatactcaattgctgggactttgaatgattttccactgaagtttagtgactaaactataaaagattagataagaaggacaaataaagtgcgctgactttggagttcggtactctattacacacctctctgaagaaacaatcagtcatcagagacgtcagacggccatctcatcctgccatttccaccccaaacaccatgatgattcacgccttctcaatgctgaagtataatccaaaatttcaccagcatacaaatgtgaaattgtttgatccgtagagcaaaaaaaacgggtcctcccatatgaactgaagacattatgctcaccagcatacaagactctgtttaaacctaaatcgttgatatatttacaaacacattactcaggtaatgaattacccccaaagaaaacttccatttctacacatcaaacaatacgacatctatggagaaaacctaacacccacccgtatcgaattctcgtaattcaaatgagagctcaaatccacgtagatcaagaccctcttacgtaacttatctccaaacgttgtcactcacaaatagatcccatcccctacagatccacatgtcaggatgcaacgtcgctgcggctttacgtggagagagtctcgtcggaaatctatgacatggtccgacccgttgcgctacactggaggtgcctgatccttgagaggagtctccttgccaagaggctccacgctggccctgcagagaggacacgtggagtgggagtggagccacatgtcgatgcatccgacgtggaacaggtgcttgcacgccggcagctgccgcaccgtctccccttcctgcacgatgctcaggcacaccgcgcactgcgcccacccaccgccgccgccgcgcccgctgccgctgccgtcgccgcggggcgccgcctcggcccactcttctctgcggtacacgaacgacggcagcgtggcgacggcggacgcgctgagcccgccgccgccgaggaagaacggcctggccgccacgtagacgacggtgccgccgccgcggcggcggcggcggcagcagaggcactcgcagagcacgatcatgaggacggagacggcggtggcgaagaagccgatgccgaggaggacgagcgtgtcgtgcgtgctgtacccgccctggtccgtcgagtacggcagcgagttggagctcgacgacagcgacatggccggcgagctcgatcgagcaaagctagctagctagctgcttcttgatgcctctgtacttggcttctctgcaagctatcaactgtatatgatggaattttagattaattttggaggtttgatgagcataatttgcttgagcttgttcaactatatatatatatatatatgagatgcaagttgtacaaatatttttagattaggcgttgaaagaaatgatgtgactggtaaattaatattccctccttccctaaatgtttggcgccattaactttttaaaatatatttgaccgttcgtcttattcaaaaacttttgtaaaatatgtaaaactatatgtatacataaaagtatatttaacaataaattaaatggtaggaaaagaattaataattgctttaattttttgaataagacgaacggtcaaacatatttaaaaagtcaacggcgttaaacatttagggatggagggagtataacggtatagattagttttggaatttgtaatttatatacaagttcaagtatacatgtcattatgtctactctgcgtctctgcggcgcatgaagttggggctttactacccacggtattcaaattaaacttgtataaaattcatttgattaatgtgggacgaaaatgggataagcacaagccggggagggactatcggataggtgaatactacaatgttgttgtttatatatgtcatatggcaatgattcaatatgaaacaaatccatttatattcctaagttagattcgttttctaatcaaatatatgaaatctgattatatatcaaatttgattatgcatgttattgttatcaactagatatctcgatttccctattggatatgatcaattaggtccatttccacaagggttcttcctctgtttcctctttcttatgaatttgatgatatgggagaaaatagaaactcattggtatatatcgaagatgaaggatgaaataaaagatcaattagttgataaagaagagaaatgtaataatgagtccataaacatctaatgattattattagaatctaacaacgagatccaaaagcagttcggagaatttaaattatcattcagttgtacttcttacttatatcttttatccatatagcttagaaataagattttcttagttgattaaatccttaaatttttttttaacgttgggagctcatcatgaatccactaatcgtttctggatttgtttcgttctactgggcctggagttggtcatggtattgtagcatggcccttctatactagttgtggtactctgggaacccttttgcttaatcctaaaaacaaaacaagtcacttagattagatattttcttcttttttataaactggtgcttgcttttggatttccaattgtatcatatctttactcccatttattattcctgaaattttctatttaaaggaaaagataatatccccaccctaggatgattaatttgagcatttgtgtcttccttctcgtcttttatttagagtagtggaaagtactctcctttgtttaggaacttacttatgtaacatttcttttaagaaataaggtctttcaaatgtcaaataagacataattaggatagcttaatctgaaagaaattacagtcgatatctgaataaaatgggatgagaaaataaaaaggaaaataaagtaagagaattcagacaaatttatcattgtttttcactttattaaagaaatgaatcgagcacaactcttatcaccattgccaagtctaaccagaggtcacagacggttatcgcctcaagatcaaaagctactttatggtattagcctccaagggaaaacatctgttggcactggtaactcggcagtaatttttaagtaatagtaagtacatcaagcatcatcttggatcaaactttttttcagacaagtaatagtaagtacatcaaacaaagcctcactattattccaagatgtttgatgatatgactaataacaaatatttttttcagacaagtgcccccttggctgtatatgatccgatccattcgtgtgcatgctcgtactagcgtcatggagataacccttgttagtttagataactataaacaaatatgcatatatgcatgcgaaatcttttgcagatctaacttcatgtcatgctccccagttatttaacgcaaatcgtgttcaatgtctcttcgtcctgcaagatagtcgtcaccactctgcagggataattaattaacaaacactctcactgtagtacacatcttgctaagctaggtttctcaaccactgacaatctgatgacatacagaagctcaattaatatatataaaccgtacgtgtcttcctaatcacaaatggattatccttcgatcagttcctgctatatcttagcaaaatttggctggactgtcttatagcctcttcctgcagtaactctctccggggaattggtagtagtgattgtctgacgactgatatactagttagttacgccttatttagttcccaaaaactttttcccaaaaacatcagatcaaatctttggacatatgcatggagtattaaatatagataaattaaaaaactaattgcacaattaggagggaaatcgcgagacgaatcttttgagccttagtccatgattagccataagtactacagtaacccatatatgctaatgatggattaattaggtttaaaagattcgtctctcagttttcatgcgagttatgaaattagttttttcatttgtgtccgaaaaccccttccgacatccggtcaaacgtccgatgtgacacccaaaaattttcttttcgcgaactaaacaggcccaatttggttgcatcatgaggaaagaacggagcacacagttgaaatgggttcagggcctttgatcagcctgattccatgtacacacagtaatgattgacagcccatccaacccatgaaaggagagcccaatttgaggacatgacttgaacacagtaagttttcccgattctcgcggaaatgaattgattaatgtgaaacttttgtattccaaaagtggccggaatgtcattttggtttaattagaatagttattttgcgatcacacataaggtgcataaggactcctccaccggccttgttttttcgtttatacttatacttatcagccaaaatttaaattttcaactttaaatttggagttgattttaagattttctttcatcatagtatatttttcagcttttgcttttagatcattaaaaacacatatataaaagttttattcacaaattattttcatttacaaatatattgtttcgcttatgcttaaaatcagcgaaatgatggggccgcacatatgatactcgcactcacacatccgcaaatactcccctaagtacattcaaatataaagaaaccatgatctgaaaaaaaaaggaaacgaatagcaaatcctaacctcatgcacaaagatatacggtgccattctgtttaatacgtaccaacttatatgtaatatattcgtagtatcaggattcaaacctagagaatggacatgtatccatgactccaccaacatatgcctccctgtttagttcctgcagttgatagcttgttcacataaattttgactttggttatatattgcttcactgtgtattttcattgtttttaagatactaggttttatgttaaaaattctcctgaccaaacttttttaaaaaacaacttaaaatcagacaaatttggcaactagcaacaatacagtgggggaataatatctcgaaaatatcccacattcagtgttatctctcttttcagggggtgacaaaacttatccagctttgcaacctgtcagttgcgtatcatgtgtcaatgttacattgacacacatgatgtgcacgtgccatcatccaatgagcaatggacaagttgcacggtgcaacgggataagtccattgtagtctttgtcaacctgctctacaagctccatgaacctcaagattcttcacaagttgctctatcaatctcaagaatttaattgacccatgacgacgaatatgtaacaacgacgcaggatattttgcagtgatcggtgcatgtaacctactatggggtgaaaatgttacagatattttgctgtccaatcgaagtgttgatgctgaaattgttgtattttgaggtcaaaatctgatatttcatcgtgaaaggtactttgaattcagaaaagacgcgcgcgactaactcaaacaattaatgatattctgataattgcactttctgatactacaaaaattactctgcaaaaaatccctccattccaaaatgtaagtgtttttagactctgacacggttcccgagatgttattttgaccaacaataaatataaaaataagatgttttaaataaaaatgtgcatattatgatagtttgtttaatgataaatctagtagcattaattatacatgtttgatcttttttatatttttgctattaatagtcaaagtttaaaatgtttgacttgtaactatgctaaaaatgtttatattttaggacaaatgaagtaagaagcactcaagaggactcattaattagaaaggaactgaaccaataaaataatattaattttttgcttcagaaaacagttttcagctagcagtttttttttctttttttgagaactagctaggagtctatatataataatgttcctacaatatttcacattaatataacttactagtatactgccaatcacaatgacaaacaaaattattgttcctaattaaaatatttgttcggctcctttcagtgatcagcccacccaatattcagttgagtgcaatctaatccatatcactttcactattaattactccatctttgcaatgatactggcacgtatacacaagaaagtaggaagctaaagcagagccaaataaaacctatcaaaattcagcagaattaagagatcaaatgacactttatattgaaaattcgtttgtaattacagaatcgaaatctttctaactgtacttaataattacactaatcctaattaaaacacctcaaacttgccaaatctgcggggcgcgatccatggcgccggccgctagactttgtcgccggccgcggcggcggcggcgccgacgtctcgccggcagagcgggcacgtggcgtgcgagtacagccacatgtcgacgcactccacgtggaacaggtgcttgcactccggcagccgccgcacggcctcgccgtcgcgcaccacgccgaggcagatcgcgcactgcgcccacccgccgccgccgcccgcggcgcccctccggtacgcgaacttggggatcgcggcgagcgcggacggcgccagcccgcgcaggccgccgacagcggcgggtgcggcggcggcgccgccgccacggccggacggcgacgccgacgccgaggccgcgtagccctgcagggtgacggcgcggcggaagcagacggccacggtgaagacgatgatggaggaggcgaaggcgaggcagacgagcaccaccgtgtcgcacacgcggtagctcccgccggcgacggcgtccgccgcggtggcgctgctggggtcgtgggacgacatggggcgaccgcgcgcgtggcgaggagtagtggggtgggtggtgcctaatgatttgctagtacatatcgagctaagaatttagtgatcttaatttgattaattaattgatctagatcctgtttagatcctccaaaataacaaaagttttgccattttgtagtactttttgccattttgaatctaaacactattagcaaaagttggcaatttggcatttggcatttgctagtccatagtagcaaattgtgccaaaaagtgctttgagatcactccctctctctttctctctcactttagtgctagaatggcaaaactttaacatgcatctaaacactaactagtacttttgtaatgccaaaacttttgccaccaaaacttttgccatttgccatttgccattctaaatggatataaacatgcccctagtgctcgattattatgatgtgatagatgctggaggagagatgaattgggggattaggagctccattgtttccttataagtcaaattttaaatatttaaaacttaattctttgagcaattctatggttcttgaagttaccatgatgtattattttttctattgtaaatttagtatataatagtagtatctagataccaagaggtactaaattttatgctaaatttttgatatctcgtgataccttctcaagaacggtaaaaatgctctgattccttaagttaatttgtattccttaagttaatttgtctggtttttggttgtaatttattttacaaacaattacttttaatcactaggtacacagatataaaaattggtcataaattattttttttaattttaattagcgattcgcataagcaaaataatgaatccattaatcaaggtttgaaacagtgatgtagttatcagacttatcaaacccgcccatatttgagtcaactaaaattcagttgtagtataaaagaaatatttcaattttacaggtttttgtcaataattacttggttatcagtgaaatcgctacggaggggtatacagtgaccgatctttgtaaatcctgtgttaaatcagttgattgtaaaaccgtgggtaatgcatgaacggttttgtctagataacaagttcggaagaaatcttttttcttttgaaagaaacttgacaagattattggtgatagttgccattaaggtcatatcgaactactatcgaggacagtaggaaaatgaaacattggccaggggtggcacgtgcatggtgtctaatcaaatagggtaatgaagtagaaatagtgtcacaaatggtcctctaaacccttgaaaactaaggctgtcttcccgaggactcctgacacaaaaatgaagcacacgattatagtgatattaattaagtattagcctaaaaaatttaaaaaatagattaatataatttttttaaagcaactttcatatagaatttttttaaaaaacaaacaccgtttagcagtttgaaaaacgtgcgtgcggaaaacgagggaagtgagttaggaaagaggtgaaaagaacgtatcctaacagggttaacaattaatgtgaatggtttaaggtgactggttttcatcataattaaaatctgaagaaactttgatcaaacctgaatagttttttaaaatgcacaaaagaattaaatagttacggggcgaaagaggtgaaattcatgaaagttttttagagagtaaattgaacttgtaaaatacttattttggtgcacgaacttgtttggtgcatgcgaacaaagtcaaaatcacacggcaaatttaatctttttaattttgttgttgatttaaactctatgtaaacatgtgtcttaggaggataaacatataataagacataacgattgcataaaaaataaaaaaaccaagaaatgatgtaagggatagaaacaaagaaatataaagtggaaattaagtttacaagtataacatttctaatatgtgcacgcacatcatctactactttataatttataatattcaacatagaaaaatcggtcttatcgtatcattttagccttagtttgcatgtatcgaacaagtttatataccaaaacgagcattttacaagttcatacagtaaattacatctatctgataagttcatgtaccgctaatataatttactctttttttaaaaaaatattctggaattttgaacccgggtaatagcctggacacaaccaccaccacaaatagtccaataacccctggtgcactcaaaagcgacaataccttcaaattatacttattttatttagtttagttttgacataggccgtttttagcttcctcttgtttctaactttccatcacatcatatcacatgaaaactttcctacacacataaacttccaattttttttcctaaacttccaactttcttcaaacttctaacttttttcaggaactaaacacacccatagatgatgagagccacctgagcagaatgatcatctctaccataataggtcgcgctcatttggtatgactatagcatagtacaacaagattatataattttgatatatgtagctgaaaattaaaatacgttattttatttatgtgatattaaattttgtttacatgtatacattgacctcgttatagttctattaaatgtaaaaaaaataaatttaatcaattacatttaattcattattctatttatttcgattttggttcaagtgaaacttattatattcaagtttgtaggtagtagacatttcagtagccaatgcagtaatacacctgtaaattcaaaataatttgtaaatatatggcataaagaataataaactgtaaaaaaaaacaaaattcatgttcgaccgatgttaggcatgaccttactgtatcatgttcaatcattctgatcctacaaaaaattttttttctgatccatgtcatgtggtctacatcccaattcttctaatgaagtctacatccaattatctgaattgtgacgtgtatgatccaacgccaagatattttgttctcctcgttgtgcaagaaatcaatgggggacctgagatgcgacactttttacaataagagagaaaaactaagccgggtaatgcaattgcgtgttatcaaaaaataaaaaacacaagacatagcatctatagtttttcgctattgtttctatttattcatgacttaattcaagcataccaaatggatctctgttttagttatttatcactagaacacattagccacaggacaattgacgaatacaacagagtacattgccttaacggcacatgcaaatcgatgtaaaatacatgtctaagcattgtgtatagcaaagttacttctgttcctaatctgcacctgagtaaggctcctaggttgtagccaagaagctcaataacttctgtagtcaacaacttgatgagtgaaaccctgaatttcaaccatatgcctaatactataatgcaatatattatagtaccattatgtttccaagatatagttaaaaataaatgagttatcctcataatgatgcttatgatgcttatttaaaaacgaaaatgacagtagactatgctttcttttgtggcacacacaactagcttacttgcgctgctctgattcttcctccctggttccatctctgcacatttccacatcggacagtagttttcagatttcacctttaccttcttctttttccaagaatgatttcagcttgacctattcttctcacgtttttgtatagtttttttttgccttggattatttgttcaacgcttctaaaaatacgatttctcaaaagaaattcttttacttcgtaccacttgttctaagctactggtattattgaagtttatttcttaaattattggttcatcgcgctcatcaaggaaacagtccgtctaaattatttgaattgaagacactcctaatattgttaggtagacagattgtttcaggattcagactttcagagttcagagacaatagaaaagaccctgagctgctgcagacagcagctgctcatatggggtgttccttgtggatagacatccggttattatccacttgaattgcttttggatggctctgtggctgggttgctgcctaattccatcgtcgctgtcaccacctcaaataattctcctcagtttcgtcagtcttcagctgaagatcaatgcacattggcgattgctagggtcgttttcgagaacaagaacaatccagaggcgccgctggaaaagttcttaaaaatgacatgagtattcatgtctccgttcatcttattcttgtttatcacttcaaaaaatgattaaaagtttctcacctgtattgacattatcgaaacaaacatgttttgtgactaacttttgaattttttagaagcgcaggtgcacttctctctatgtacgtacgcgtcctctacatatgctggaaaattgttaggaccgtgaatacacttctaataaaattatgaacaagcatctacaacttaaatcattaaagaataatggataggcatttacctacatagaactctctcattgttcgcttgctggcttatcagccacataaaagtaaaaaaaaatataaatattttaagttgattttaagatattttttatggtagtttgtttttcagtattagattttacttaaagttaatttcaattgtttcgtttatttttctacaggatatcctctggccatgcatacacaaactcctggcgaattctctgcttaataaaacctctggcgaatcgtttaagctgatcctactttattcaagcctgcacctaccagaaatttcctaccgtgtttttaaatctgaactttgctttcaacacatggagcaacttaccatgaggtccattgaacaattacactaattaatagctaattaatatcagccacctgtcctccaaatcctgtgtgctcaacctcaaccatcacccagtttgcaactccaatccatgtgcaagaaatcgaagtttctccattcacacacacacaaacaaaaaaaaaaaatcgaagtttctagcagcagctaagctaagctaagcttaccttccacttccaaaccgcaccacttgtggaagcaaaagacacagttctagcacaccaaaccgcaattaattagcactaatcgcttgcataatcacgaactttatcttgatacaaaagcatccacgatgattgcctcccggccagccattccccgccactaatccataatttttattctgttcgcaaccagccaaactgaggccgagaagaagcgtagctgcgtaggcatatcggctttgctttgagctaagcttgggctgagtgagtgtgtgtggcacatgtcgtcgacggcggcgggcggcgcgccggggccggcggcgcagcgtcatggcggcggcggcggtggaggggggtgctgcagctcaggcgtgacgctggagctcgtcggcgcgttcacggcggtgtgcctggtgctgtacggggtgatactctacttcaactacctgtacgtgcggtggagcggccgcgacggcgtgcaccggacttcgggcggcggcggcggcggagggcgtggagcggcggcgaggaagaggggcggcggcggcggcctcgacaaggcggcgctggcggccattccggtgttcaggttcaaggcgtcggcgtcggcggcggcgctcggcggcggcgaggcggagtgcgcggtgtgcctgagcggcatgcaggacggcgacgcggtgcgcgcgctgcccgggtgcggccacgccttccacgccggctgcgtcgacgcctggctccgcgcccacggcacctgccccgtctgccgcgcgcgccccgccgtgccgcctcctccgccggcgaaaccaccctgcctgaaggcgccggagcccgccgccgccgccgccggccggcagccggtcgacctggagagccatgtatagcactaagctaatcaagacggttagttaattttagccatgtataaaatctagttagctcctactcctactactacatgttccttaattagtttttttttttttttgcgttcttgaaatcaaacgccattttcgtcaataatccagcaacgccattgttcccattgagatgaacaatgcctatgtccaatgtcttggcactctgtaaatcactttttgttgttttgctgtaatttttttcccctggtttttgccaactttgaagcacaacgatgtgcaatatggatagcaatcttatctgataaacactgcataataattgagtggttaaccagatttaactgctagtagtggttgcattcaagtaaatcaggtgggtggttgaactgatgcctggttgaaggggacattgcattgccattggtagatgtacctctcaacacttgcattgtgcaagagtggccacagcgatgacactgaggcttgtgcattatcaaggcatcaaaatggttgtttactactcccctgtttcatatttcgttttttttatcaaacttcttaaaagtttgattaagttcatataaaaaaatagtaatacttataacaccgaattagtttcactactgactattttgatagttttttcttgttttatatcgaaaatattactatttttttttaaatttggtttaaacttgacttataaaaagttaaaattacttatgccatgaagcagaggtagtatatatatctttttccataagcttacgacaacagcgtcaaaacagcctatgtaccaacgatgttttttttccctatgatatgaaaggatttttttttttttgaaacttgatatgaaaggattgtacaatattcctaacaaacaagttgccaatataggtgtgtggcgtgtacacctttcttctcagctgaagttgcggtgggcttattgagaaaagcttaggttatcactacagatgtgctatatatgtttagagaataatgatactagtactacaggacaaaatatggtagagcaattgcagtgcctatactatactcctatataaggggttgtttggttggcatactcacgttaccaaaacttgccatacttcatttagctaacatgcctaacatgtggataacaaaattgaagccacacttcaaccatagaagagcaaacttgccacacttttacgtgccaatgacatgtgggacccacgttatggtgaaggaatcttgccataagtgtggcacgaaccaaacggatgcctaacttagtcaaacctgacttacttgagttgtggcacagtaagacaaattgtggtagtgagccaaacagccccaagactgttcgtactctctggcacgcaaagacaaatcattagcgtatcatcgattaagtatgaattattacaaacataaaaaatgagtttatttgattatttaaagaacttctatgtaaaaagttttcataaaaatacagtgtttaacaatttggggagtgtgcttatggaagagcaagttgccaccccaaactctaaaacgaactcagtagagtgctactgagcaatggttttgttttttcttcgatctcaatcgttgaataaaactaaggcattttttctttacgcaaattttgcaagaaatagtttgatggtgatagagaatgtaaacaattctcacattccaaatagggcctaactggtggagatactactacggttttaacgtaggaggattaaccttcgaaatgttgtgcgattggaaaggaggaatgcgacgtgaatttcacaggatttgaactactttctattaaaatcatgtaaaatttccgtgttctaaagtagcctggccttaattgattttctgatatatctcatgtagatcacttcaatgttctacaaatgataattgatgtaacaactccaatgttcaccacgtttacaagtcaagcagctatgccaaaagatggcttttgagccagagaaacagagtccacatgttccatacctagggctaagtggtcaatgtctccagtatataagtaaaaagtgctccatggtggatactttcactttgtggaatatttttgcattattcttccccacaaatattgtggccatgaatatattagaccgctcatgtgcctttcaaccatttttaacccaaaccattagatgacttgtcattgacacccttttaacctccactagcaataggtgatttggttacctccatatgaaagattggtcagagacaatcattactatataaacctgttgttgacaccctcttagtctccactcacccgtggtttttgctaatagaaattaaattggatgataaccacatttgaaactttgcttgccaaaaaaccaagagggaacctaaggttgggccaagactcggctaggccactatgaacttggccacattctgaagtacatggtgaaataaaaaaaaaatctgagtttggaccatatggattatggagttgtataaatcaagcaaaatccctgcaaacctcggttaggtttgcatgtataaatccagataaaattaaaagaatgacctcacttaaatgtaaactataattaaaataacaaaatgaaattcctagctctgctattaaatattaacatatctccttcaatgttgcttgctttttttatttttgagaactctccaatgttgcttgttactccctccgtttcattttataaatcatttgacttatttcttatacgaagtttttttagtttaatcaagtttatagtcctatagaataaaatagcaacatctacatacaacatcaaattagcttcattaaatttaacattgaatatattttgatacaatatttgtttatattgaaaatgttattatattttactataaacttaattaaattttaggaagtttggctttaaaaaagttaaacgacttataatataaatattataaacggaggagtactttgttagtggctacaatgctatgcacgtgttgtccttgttcataattgaaagaataacatctcacaccacacatcttattatctcggttttgaaatgatgagcgtaaccaacataggtccatcactatacctttgtggcaaccatatgtcgacacgacgacacaccagacgtacgagctattggccaaagccaaacgtggtgatgcatgactgatgaccaccaactcaagggatctaatgccatgtgaagcgtccagtggcagttttttgttgttgcatatttgtatttctcatgaataatgattaatttactttgtgttgtacagcttcattcgtttcttgcttctctcgtgatctcgtcaatttctacgttatctttttatgagcatgcctctttttttttcactatttaggcttctctcgctaacttctacattatccttttagaagcatgctttccgaacagataaacaaagtgttttttaaatactttatatataaaagtttctaaaaaataaaaaaatatttttcaaatttgtaatggtgaatacttaattaatagtatagtaatgactcaagttttatgtgttactaaaaagctaagttaagctgaaacgaacaaagcattagacaccattattccaactttaaggctcattcggttctagacttctacttgtgtcgttttttaaggttgtgtcgttttttaaggtattgacttgtaacctcataaacatgaagctgaaatttgtactatttgaaaaaaaaggcatacttaatccaatttagtgtcctacttataaattatcacgtgcacaattcttttaaaaatttctaagtttcttagaatatttttagtgatgggcaacgcacccgtcgatagcgagacgtttttagtaacttagtcaatgttaagatatactgatataatcttttgaatgtgcttatagggattaagtgtgtgtatacattaataggagtgagaacgtgcatacgttccttaaaaaataactttttaaaacagaccttactttgtaatagttattaattcattcgtgtgtaccctcaatattatcgtcttttaatttccattcagccattccaaacggtgtctacaagcagtaaatttccatgcatttatcgaatttagggtattttgaatcacatgaatgaaaaaacagataaatatgaaagacatatgattctgacaataatgcaagtataaaatagatgactttaaaatatagaaaaaacatagaaatgaccgtttgattgggccataggaaaaacaccggaatttgaggagagataaaaattcgaaagattctttctatgaggttatgttaagggcccctttgatttgtaggaaaaatgtaggaattttggaggatttcaatcctatgaaaaaaaaatcctatgaaggcctttgaaacaaaagattgaatcctatccaatcctttaaaattcatatggaatgggtaatcatacgcacattttggaggaaagttagtaagaggtctaacctcttggaatatttcctctgagtctatctctctcatctgattcctgtgtttttcctgtggtccaatcaaacggctattcctttgtttttcctatgttttgtaatcctctgttttacaattgtactcttgtcagaatcctgtgttttttcaatctatcagtttttttattcctacgattcaaaggcgcccaaaatttcctccaaaaatttacatgagaagaggcattctacaggaatttcataggatttaaagggttatattggaaaaattcctatagaaataaaatcctctaaaaatattatgaatttcctttgaatcaaagagggcctcaagtacaaaaataccgtccttgcactccgagcaaaattcatcccaaaattcaaatccacgcacacttcaaacttcaaacttgaaaccatcgcttccgaatcttgaaactgccgcgggaacgacgggaagaatcaccgaatcagcatcccattacgtgacgccacgtgtcttttttttcccatcccaaacctcggaaaccgcgggccaacaaatttcgaagcctccgcgccaacacagcgcccgcgaggcctccccttccctcctcccccaaaaatccaaaattggaaaaattttaccagtcgcctcctcgctccaaagctcaaaatccaaaaactgcttcagctgaaatgaaatcccagaggctcgcaacccacgcgcccatgaaatttggggaaaatttagcctcccgaatccccaaatttcgaaaaaacccggctggttcatgccgcgcccaacctcctctttcgagtttcgatccatgtcaaataccagcgccaccgctcgctcgctcctcatcgtcgcaaattcgcaatccgctcaccaattcccacctccagatcgactccatctcctctcctctcctctccatggccgttcttgggtcgcgcgcgtgcggcggcgacgacaaggagaacgtgccgccgatgccggcggtggcggcggcggtggcggcgagttcttggcatggcatcgccgtcgtcaagaaccagaggatgaagaggccgggcggcggcggagggaagctgcggaggcgcgtgccgctccgcgacatcaccaacctcatgtacgtcgccgcgcggccgcctgctccaccggctgcgagctccgtgacggcggcggcgcggtcgcgggaggagccggttgcggctgcggcggcgttgccggcgaggcgttcgctcaggaaggagttcagatagcggcacgaagcaattcgtcgattcagattggcagcaattgctgctagagttttgtagcagtaggagcgtagaacagatgaaatggaaatggaaattgaaacaaatttgattcagctcaattcttttgcattgctactgaggtgttgccacaaagaccacaaccaaaccatggtgaccatcttgcatgcatgccaactgttcgatggaatgctgtgtgcacgccagaatactcctttcttcaaatcgctgtgaacccaagtgttcgtcccgatttggaattttagatcagctatgtttcatacctacggagtactcaacaacatcatcattttatttctttttgggagaggaacatcaacatcattttggaaccatgtcatctacctccatcgccacgaaataaaccaaccttagatatgatagaacatcactagtaccttatacaacgaactgaaattcaggtatcatctgacctgggatttgataacgggacaacagacaccaacgagccatcagccatatttgcatagttgcatctcatcaaacgaaacacagctctgaattctagagtgtgtactagccattttcacatcacttcaacctgaaaaaattactctatatacttgcatccatttcaaccttatcaggcaatccagctggttagtaccaaatttggtttggcaattatcataccagatacctatctcactacccggtaccatactgtttcggaacatgaaaccgtggtatagcacctcctatttattactccctctgtcctctgatacaagggattttgacattttacttgtactgtttaaccattcgtcttattaaaaaaaatttggagttattatttttttacttactttattatccaaagtactttaagcataacttttcgttttttatatttgcacaatttttttttgaataagacgactggttaaacagtgtaagcaaaatgtcaaaatctcttatattatgagacagatggagtaagagcttaaggagagagactatctgactttttataaaaatctgaatattatgttctattatctcttcaagaaactttaagtaattaattatagaagaagagttatgtttatatagaccaaactgcaatagatcgacaacaaatctgaaagttatccagtaaaaaacaacaaatctgaaagttatgagagatgtgtaaaactatccagaagaattgtttcaaaatagttaaaaatatatttgattggcaagttacacaataattgaactatgtgttagggttacgggtaaggtgtaccctctatccttgaatataagatgtgtcagggttatggataccacatacctaatagtagttgactaaatctcgacaggacccaccacataccatgtcttatacggaaacaaccttcggatataggaggagttccgcataaggaaggatgaatagagttctacatggaaacgactaggactatttggattatatccatattggttttcctagttctacttggacaatgggacacctatgggtataaatacaaggccccctaggaggagaggggacacggaacaatagatcaagacacaaaatcaacatacaagccaacacgccgccaaatatcaacatcaaagattagcttagacaaaccctatcgggggtacctgcgggggccggcaagaggggtcaagcactatctctgatctcgacgagttcgtgctcgaggaagaagactaccctatcgtcgactacgagttggttatctagccatcaagtcgacgacagccagatatgttatcccaaatgttgtatttgtgtgatccagatgaataaagagcaacaccggcttcggccaacaggatgtagggttattacctgacaattcaggggcccgaccatgtataaaaatcctcgtctctgtctcttttacctaagtctcgcatatatcctggtaccaacgatccccataccatgcaaataccggaatcgtgacatcaaacgtcgacacgatgggtaccgatatagtatacccgcgcgtgtacgaatagtttccgtatacattaaggaaatctatcctgtgatagtaacggaatctacggatggaaggagtcttactcgggcaagactggggcaagactgggtctttaccatatcgtgaggggtccgatatctccgagttctacttggagatcaactgacccacggtataaaagggacccctgggcaggacctaaggcatcaaatctcaccaccaacacacccaccacagcctaccaagccggagcctacaggagccaagtcgccggagatctagtcggaccaactgactacggtctcgtcggtatcatcgagttctgttattccctttgtaatctgtggtttccatcatataatcctataccaactggattagggctattacctgctaaggggtctaaactagtataatccttgtcttttgtctgcttgatgtcgtactacgtagatcctcgtaccgacggaccccaataccctctatatccggtctacgggtatccccgtcgacactatgaaaggcatgttatgcggcaaaattacttacaccaatatgtttcattgattacatgaaaacaaagttacaaatatgttatctcacaaaagttacttatcaactgtagtgtgccatgtaaagatgacaagaaacctacatatttgttattttgaagaacacctaacttatcaagtatagttggccacgcaaaaatgacaacattcttacaagtttgttatctcaaagttagactcatcttatcaagtataagaactttatggggtaaaaacaaatatactcacaatgcaaagacatacattaagagtatggatagacatgttaacaaactttatttgtatttcttcaaaagcacaaggagtgtgtcatggctgagtcatgaaatgtacaggtcaacttgcaaagttgcaataccctatgtactattttagcaatacaagtcagatattgtctatacatgcaacaaactctatcacctaaatcccaatatgccttttctttgctatatacactagcttgatctatcattgaactcacatcaattagcttaagtttccattagcatatacagaaagctatggcaactactgtttcctctcagttttctatatgcttttgtgtacttctcttggtccatgattctatggcccaactattttatccaagaacaaacccatggcatagtcctcatcaaggaagttttagtgagtatagatttgatagattacaagcatttgagtcacttcagaaagtgagatcagaaggtggtgtgactgagtatgttgatgagaggaatgaattattccagcacactggtacgtttgtcatccgacgtatcattcagcctcaaggtcttttggtacctcgatacaccaacactctcagcatggtctacatcatccaaggtttgtatgatgataaatacaataaaaaattctatcaatgcagctggcattctagcacttatgactttcatggtcgaaagaatatgttttgatgtttttatgcacctaatgtgaacattttaatttgtagggagaggtactatgggcttaactttcctcggttgcccagcaacttaccaacaacaattccaacaattttcgcctcaatggcaaagtgaaagccaaaagtttaggggcgagcaccaaaagatctatcaatttagacaaggagatattattccactcccagctggtgttgcacattggttctacaatgatggtgatgcacctgttgttaccatatatgtttatgacataaacaaccgtgctaattaggttgaaccaaggcaaaaggtatctttttaactaatatttccatagaagttgtggttggtttatgtttttcacatgttctcgcattgcaatccatacttaaaacatccagcttttcattgataaaagtttcaggaattcttattagctgctaacaacaatagagttcaacaagtatatggtagctcaattgagcaacaccctaggcaaaatatattcaacagaatcggtgttgagcaactaagtgaggctttaggcatcaacacagtagcagcaaagaggccgcagagtcaaaatgaccaaagaggagagatcattgttgacgggttatacccgaccgcggtatttaagggacgtaaggtacgactgataccaaggaatacgcgagagtggaataagagagcatgggacaaggatttttatactggttcaggccctcaaggtaggtaataatcctactccagtttatatgtactgatttggggtgcatcacagtgtgtacaaatgggaagtaagctagctcatctagcctaccaaacaaatctcgacatgcaaagtggcgggttgtagttggtggttagttgaagggcttcctcctggcgtaaaattgatgaggcttggtgtctatggtttatgattcgatgcccttccctcataggagaccctatttatgcacgggttccaattagaataggggcatacaagaccctgttatccctgtatcgaactacacaattcttccttaggtgaacaaggattttccttatttctatctcaataaatatttagggataactttccatataagaataggtatgcagtattcctggtcatggtaagtgtaggtatatgggatatcacatacctataacattgacggtagcccccgacctctgcaaatatacatacgacatcaccgttgcccttttgctcgagaaaccattttgtcaagaaagtaaactgcaattggaaaacgtaggattacgtcaaggtcaactacttggtccttttatctgggcaatatgccacgacatgatcggattttaaatctggacagaggttagaatcttaactgccaaataggaatgctctattggttccctgggaatttcggaccactttcctcaaaatgctaaccatcagccctagctttatattccagcggtgagattcatttagaacctatttgcttcagttgctctttgcgctcttcgcgttcaaccttccaggacccaaaagcactagtttctaccacaaatttccattccttccccgatcatcatcaatgtatcttggagaattgaccatggaccaagcggcactcaaggagctgtaggtggagggagcaatccatgggtaagggatgatgaagtattaggtggtaaggtaccgaacccgctcctaatcttagagaaatttaacgtttgcatccttctctcgttgcagttgtttagctccccatctgaatttctctcggtgcttcttgaattctacgacatccatcttcttcattccaaacccaattccatctcattcctaagcatcttacacatttgtgtgaagcatatttagtagtgcacccttttggagatttatttaggtacttctatgaactcaagttcatggagaagtcaaaaatcataggcaactgtggtgttcgacttcgagatggcctgaaagaatagtacatagagatgacccaataaacctctagaaaaggaatgaatacaatgttggtattatctatccactgacaccacctccagccacctccctatcctgaccaccaagcccaaacgcgaaacacatagaccttttactcccacctattctgaatctctcaacatctttgttaataagatttgagagcttaggagacgtggtctgacaacatatgacattgtttgtgacttcacgcgtcgtcaaattcatgcgctctaggcaagcgagcaccatgtgtatgagtatacgtgtgataaagaccccacttggatgtccttgcggaatataatcatttatcctcactcagtctctacattgtattctactgaagtacaagactaacttcaatttgtaaatgtttagatcttcccgaggacatggtgaagagcagcaccaagaaggtggtgatagacaagccaagcatggctagagacatcccgacctcgttgtgcgacctgccccaagctgtcagggatgggattgtaaatgtaggtattcagaacccatcaccctttcatctaatcgatgtcatagggaagtaatgcgagcgcttacaagagttgcccctgaccaatgccattaaggcacttgttgaccaccaggaagtcgcggccacaaaagacgtggtggagatggagatagggtcctctaccgccgagaaggtggctaacatggcctctcaacctgggtctagtggtaccgttggatccaagaagaggaaatggggcttcggagtggaccccacgggtggtgtcctgacaaagggtacccattccttggtaagtacttgtcctctactatgaagtcctcgggaggataagattagtagaaaataaagatttttctgacttgtgtagtattgttctttcacagacctcctcacccgataatgcccccactagtggaaggctcaaaccaatgagatttatgtcgaagagcaaggccaagtaagcagctcattcctcggtcactcttatattagccttttataacattgtcggttgattcaaactgactcgttttttttgactggatcaaactgactctttgtagggccgcccctaccatctccaatcagaacatggggaaacatgacgaggctagttcccaaccagccacccacatcatcgtctccccctccacagcccccctcccctccgttgctgcagttgtcttgccgcctccaggaacggcgttcaaccatctagctagtgcctgccaagaggtactcttttcagctaaggcagccagcacagaagtcaaccggctcatcgccgagctcactgctaccaacgagaagttaagcaaactcaaggaggagttgaccacggcgaacaccaacaacgaaagcctgcgccttctcattaaagagaattcggaaatgcaccaagagggtcagaaggccctagcggaggagaagagcaaaagggaggccctttatgccgggctgaaggagaacttctttgccttcaatgaggtggcgaagcaacttggtcgtggggtgcagccgccaccgcacttcgatgatgtctcgctactagcgtccattggcgagctagttggcgagatggagaaggtccccgctgacatcatccagaaagctgactgggacacccgcatcgccctcaagactggagcctgccacacccttgcttgtatctcgtccaagcatccagagctggacctcaacaaggaggtccacgagggtgtggctgaggaggagagggaaaagctcatggatcaacttgagaagactggcgaggcggtggctagcttctatctcgactagtaattttaggcaatcttttaaaagtcgctttctagtgctgtagtgacttaaatataatcagatgcattaatatctcctttatcgatattatataatcagatttttttccatgtattgatatttttgaaaatataatttatcttctatatgctaatagaatacttttgtgttaatattttattatgcaaatcatcttccatatgctacagaagatattttatgcttaggccatcttttatgtaagtgattccctttttcatatggttcataaaaaatagtttttgaaataaaaaacatagagaaaatattgaaacatacacacaaatttctatattgtttaaggaggctacacaaaaaaaatcatatttttccaaaacttcaaagggtcagtcaattgtcgatctggtacatctaaaaaagtatccagtccaatggtatattgtaaaaataattaataaattctgtgtcatattatggagagagataaagtcgatgatatgaatatatccattcttgttttcaagaagtgacatgtacacaatttgtacatttcagtgaatatgatcatgtatatttttcatggagttgggagtggcttcatttttatgccatcaagtgaatcttcgctcctattagcagtatgttgggcctttctctaaaacaaggtttagaaagattagtaaattgcactggtgggtgcaacctaaaacataaatttgtaaaacacttgtttcagtgctttaacttatctgtgtgactaataatactgagttgaaacctacttagaatagagcgcgcacgcttgaagggttcatgatctatatttccagtgcttcctttcaactgcgtagttgtacctcaatttatttgtctagaccaggacaatatgcgcatagctataacattttgtccactagctcatctgggtgaattgaatattaccaatgttttatatgcagtgttattctgcaaaaggaatcactctttgttgtattaagaaaattgggttcattacctttgtttatgcataccggtggggcatatgaaaatatatatcctttcttttgtgaattttcttgacagacctgatgctaataaggcatcatatttctatcaactggctagtacgtgttcgtgccagcggcaacgtaatctaccggccgcatgacacaaaatcatcgattgcctttatcactaccactcatcggcaactcaattacagctagcctttttggctgtctacatccgtttggatgtagaggctggtttaatccattatctaaaaaaacttatagctagcctttgctagttcagatcgaagtccatactaccactcatcggcaactcaattacagctagcctttttggccgtgtacatccgtttggatgtagaggccagtttaatccattatctaaaaaatttacagctagcctttgctagttcagatcaaattaagtccatcgaaggatatgccacccaaaaccaataaagcaaatcagtatagacggatggaccgttgaagtgttgagatagatgagaatgccccatttgctagcccctccaacgagtaaacgcaaccaaaggcattgtttcttattggtgcccaaaatctggaactggaaggggaataatccattggttatgcaccacttcatgttagtgatatgccctagaggtaatcatagagatgattgtatcacatactatgtttacatatttatctgactttgttacttgaaatagataactcattattggttaatgaatatgtgattctttcatgagactctttatgttgtgtgttgctatttctaaaggatccctgatcaaatatcatatgtggaacaaatatgtttagatgatcaacacatgtattaattgatgatcatgtctcatggatcatggtatagagataccaaattaataatgtggacacatgttggtgaacatgttgttgcatagacccaacatgagacattgcaagagccatatgtgttgtgtcatcagtgatctcatttagtgttgatgttgaatccttagacctgagattatcatagttcccaacatgtgtagtagctcacttagagactgctaaacactactccgtaattgggtagttataaaagtagttttcgggtatgatatgaaacatgtagtgggatatggataatcaagatgggatttgcccctcctatgatgagatatctctgggccccttgatgttctacattatgaaagtgcatggccatgccaacggtgattgatgagtcaatcacaagttatataatctagcaacaggttcgagtgaatgattgagttattagaggatggcacatatctagccttgagcttaatcgatatcgtgaggcaaaggggttcatacaagtatacactagaggttcaactgatatgatctttatgtatgcccattaggtcaatatgttctgctaggggccgctgttgacgcgtggaccgaataggagttttcgggttacagccgagtgtacatgaacctacagggtcgcacatttaatgggccggaataaggggattggatgaagatccaatatgagcttaattcggatagggatccgaataggagtcctacggaccttggaggcccgagtgatggatcctatatattcgtgaggggtgtgaccggtggaggtattgcatcacgtgagaaaccctagccatcactcccctccccgagcaaaaccctagacacgcgcgggtgctagcacatctgcgcgtggcgttccatccctgtacgtgtggataccggtagaggcgccgctggtttgcggtgctgatcggcgtgggaatacggcgaggagaacgcatgaggacgagaaggtcgagtcggtgcgatcgactacttcctctacatcgacgcgcgctacttcgcgagaattccttcgacttcttagcgccttcttccgctgcgcagcgcgtcgagtggtaacgatctatgatctaatacttatatggttcctggtgtacgcgatataaaattttgatttatgctatcgtagccgacgcatatcccaacacttcgtgcatctgatccagctctggcctccgggaggtgaaggccacgcagcactcaccagggttgtcccttacaattttggagccctgtgcaacaaaatataaaatgagtcattatcttttttttaaaaaaatattagttgcaaaataaatcagagctatatattatttataatacattgggacatgcctctattattactgattttttcttgctacgcattgccttccaactatacaagaaaagctagcatcaatctgatactcctttctttagctatgtcttgctattaaaacaagcaagaattgtacgcgaccaatgacaagagttatgtcaacaatctcacctagctatgtacatagacaacatatcctatgcacacatgccctcacgtgtacacacgtgcacaccaactaaaaaatgtcacaaaaaaatctagaaaaaatcatacacatactttcaattatattacacctaggggttaaaatcttaacatcaaatttattatattttagccgtaacaaaaaaaaacgaaaaatctgacagttttaaggttgtaattttgtcagaattttatcttttttgttattctctatgtagaatgaatttgaagatgcgactttgcacatagatgtaatactattgaaagtacatgtatgaattttcctagaattttttgtgataatttttagttggtgtatatggtgtgtacacgcgagggcctgtgtgcataggatacgctcccatgtacatatgtaatggcattctggctatgtagaagaagaatcgttgcaacaattcaggttttcttactaaatagaaaaatgaaatccttattgcttagaacacgcgttcgcatcgtcatcatgaaatacggttctttgatgcatttaagagtaccatcaaacgtttgtcggagttgagaagaaaataacccgttctagccgattcagtgaagtagaaagagttaaatttgaaagaattgaatctaaagatcctaaatatattggaacatattggtttaaattgaaacacataaattttgaggcccctaatttttagaggcactgtatggtcgcatagcttgaataccacgaagttgcgtcacaactgattgacaacgacaatttggctgtcgcggtaacaaaggattctggaactgcaacaagaagctctgcaggccaagtgtggcatctccgctcacatggcgatgagggtgaggtatttttatttgctgcctttgctaacgtggtaagtcctagcagagtgtgattagtttggacttaacaaaagattaccggtctactggctgggactctggggattttaaggcatgtttggcatgactctagctcctagctccacctttttgtaactgtcgctcaaccaaacagtccgcatccgaccaaaagtggaacagagtgggttagagcactttaaaaattgaactatggtgatgcatcggggaaaaggtaactccaatgctccactcccaacccaatgacactgctacccattggttttcgttgaaattacatgcaaattgccactacactacccctgctatcgggcggccgggcagacggcgcacggaggcggcaccatccctccctatctcttcccccgtgttctcccaatcccaacgactagcaaagggctgcaggtaggggcattgcatgctggcggaggctgtaaatggcgacggagtaggctgaggacgagcacagtggtgcaaggtggtggatcatgaccggaggtatttttttccccaaaccctaaaattccccacatattgacttcaaatctggctcataggggaattaccgtctatttttgttgatttgatgctattgtgcaatgataaaatggccaattttcatatctggaattttttttggggggggggggtatgaaatttctgatttaagcacttgtgaccttgagcattttgtttgattgaacaagtccaatagcttctggagaaggaaaacagtactcgactagcaaatcagcccgctagttggtgggcctccaaaatttataacccatgtagattatggaaaactctttatatcagaaatattttttaagtcttgtacataattaatttaattattgtaaaatctctataatattaatttagttgaaaataatcctttaatgggctctttgattatgtgtttgtcaaaggtttagaattgaagtataataattgtcatatatactaagtgccaggcttttattgtgttacgtatgggttatctaacattgctattaattcatgtttgtgaaaatggtattaaaaaattaaatggatgtttagtgaaaaaattgtgtatagatttcataaattaggaaattttgtctgggagcttttgatttttcaaattttaccacaattgattagccaaattttgcatggtaccgtcgatcgtaagaagtgccactagtgttggtgcatcaccgcactgtttttttaaatagttttagttgtgttatgtatttatttatttttatttatacatgctcagaagcctttaggatctagacaatattgaattattgattcttttaagaaagtcttggtcctttttttctttttgaccacaatctgatatgttttattttattatatttttctagtttttattttttcaatttttctgatgtgtcagcctattgtagtagcagtattgtttaaatcaccggaaggatccagatcttctcagttaatatcacagaccttggaagtgcaatgaggaacagtaagcagtaagcaggaaagagcataggtgcatagttagctgcagcatttttctctgttccacgtgtcagcaccttgtttgaagtttcttgtaagcaaagaatgtttaatcgggtttgctaatcaagtgagtcatggtaaagattgtcagcaaagcttataccattacatttgcaggttagcagctggtgtactgcaatatttatcaagattgccttcagttttaccagttttatcaagattgaacaaatggccaagcagcacaaactgcatgagaatttgtgcatccttataatagtcgattacacaaattaaaatggtcttgctagaacaatagtctgaacctttgtgttttttctgctccagtgtattctgctggttttcaaagaggttatcgtgaatctcttggaaagtcattgaaaattatctgaacattattattgaaaattgttgtaaattcagttcatgaatcaggttgaacagcatgttggtttcccaagtgattatatgtgttctgattttacatttagcagctgcactgatattgtgatttgtattagagtaaaatgcatggagcatcatccaacttgtttagatgtgttatatatgtcactctacgtttaaaatacatatttggatcactaatgtgaattaagtgagtgatttatccatccagacgagtataccttgtacacatggcatactaccaagaattgaaaaagttgcatctagaaacgtacataaaaccctctgtgtattttattttctttctcaaaacactaccaattgacaacaaatgaaattagtggaaccaaatcatttcacttgtgcatgttttgacgagttctagttctcagtcctctctcgtttgccatcaaacccaaccatctttcttttttttccataattttgtacctctcaattatattggtaggtctgctcatttccagaagtaaaattttcaaacctaggtgacatgccacgtgtaaggtatggccaagtggaaagttagatgagcatatgactcacttaactcacattagtgataaaaaatatacattttaaaagtagagtgacttgtatgatcacctaaacaatttgaatgaccctctatcactggtggagaagaggtttttactcccagttcgtaacccctatatagtcacggttggaaaaccgggactacgagatctttagtcccgggtgaaataaccgggagtaaaaatctatttttagtcccggttggaaccgggactaaagataaagcatttttagtcccggttagcattaccaaccgggactaaagaggctagatccggttgcttctttgttcttttcttttcttcattgtttttaatatatagatttcaccatatcccgtccccaaaatcccaaatcaatcatcctcaaattgcctccaaatccacaaatcgatcatctcaaatacattacaaaatcttaaaaaaaattacatcacaacttttacaaaattcatcacatattcacatcacacacaaatcaaatacatcacacaacaatctcggatccgaatcacaagttcttaaaaaaaaaacgccgccgcatgccgtcaccacgccacgccggctggccctccgcaccccgtgccgccacaaggccgccagccaccgctgcgcgagccggccctccgcgccccgccgccctcgcaccggccgccaggccgccgcctcgccgctcaccacgccgccgccgcgcggccgctagccgccgctgcagtagagaggagaagaggagaaggagaggaataaataaggagaggaatagagataaggttgaggagaggagttaaaggagagaggagataaggttgaggagaggaggagatggcctcgatccgatcgcgcacgcctctccgatctccgcgtcgatcttttttcccggttggtaacaccaaccggtactaaagattgaaaagtaccctggagcttttaaaccgggacaagatgttaatacaactgggactattgtgaaatctggtcgaccgatcaaagatggtttctccaccagtgtatgtattttactcattggattaacattttacaagagaccaatacttttaggatgggataagacaaagtatttcatgataatctagccggtcatattttagaatgatggacatataccatagtttcaggtcttttgctctatcattcgatgacaatgctgctagttattaatactaaacatttatattactacatatatgttatttttttactcaaaagaaaaactattaatcattcatggaagcaagcagcaaaaaccacaagggtagtattgtccatctctctctctctccccccccccctctcccctctatcctctctttcaggatttcggcagccggcaaaactagccaaacacttttagggccactttcaactcctactagagttagagtttagagctaggattcgagagttagagctctacctaataggcctgaaatatggatatccaatttcacatgtagtatctatttcaaaattggattggattatgttataccaaaaaagggatatggatatttagtggacaggagaagacatgtatggccccacaagttgtataaagtttcccttctatataataaatcatctcaagccaaatttggtaactttttataaagcgaatgtgaatttataaatattagatatggattttgcttatatcgaatgggtatggatgaaaagaatattaccatccccataccagaaactcaaataactattttatgagtgaaatgcataggtacttgtgcggatgtgtcatgtaggttactaaactcttaaaatgcattttttacatcccaaactctcaaaatataggctccaactcactccatgcgctgatatgacatgccatggtggcgccttcatgtgagtgggacctacgtgttagtcacatagaaaaaaaataaaattaatacacattttttctcctctctacattaatactattttttttatttttttatcttttctcctctcttcctaagaggggaaaagacgttttattttttttctatgtggctaacatgtgggttacattgaaaatacattttaagaatttagggatctagatgacacacccgcataagttgtgagtgtgtacttcactcataatctatctttaccatatcctaccacaatagtctaagtatgtataatagtccgagtatgagtaatggatacctagtagcaagctagcttaaacaaatctaaattccaatctgttcgtaaacgttttctcgatcgcaattttgatcttttctattgaaaacctcaattaaaccattcaatttttaatatacgcaacaagagcgtccaaaccaaatatgtaaatatggatgtcatgataattgacttatgacaatgtgattatttcatcaagtctttaaatcattaattctagttgaaggtttatgtttttcttatgctaaagggttatgtttatataagaatattaaagagcaaattgcaatagatcaacacaacaaatttgaatgtttccagatgtgtaaaaatatccaaattaattgttttaaaatagttttaagaaggatctgatatgcaagtttgatagttagtaaactgcaaaagggcttattacatggaaaattccttattgaatatgtttcattgactggtttattttacatgacaacaaagttactagtatgtcaataaaaaaatacaggttacttgtcaattgtattgtgccaagtaaagatgacaacaaacatacaaatttatttgttgttttatagaaacacctaacttatcaaggatagttggccacgcaaaaatgacaacatactttacaattgtatcatcataaagatcttatcaagtataagaactttatggtgacataaaaaataatcacaagggcaagacacatactaaaagtatggacagaaatttcttaacaaactccatttgttttgctccaaaagcataagaaatgtgtcatggctgagtcatgatatgtagttcaatcttgcaaaattgcctttttgttaagtattgttttaacactacaagtcacatattgtctatacttgcaacaaacactattaccgtgtatcccaagttgccttttcattgctatataaactagcttgatcggtctttcaactcacatcaattagcttaagtttccattagcaactgctaatagctatggcaactaccattttctctcgtttttctatatacttttgtgctatgctattatgccagggttctatggcccaactatttaatccaagcacaaacccatggcatagtcctcggcaaggaagttttagggagtgtaggtttgatagactacaagcatttgagccacttcgaaaagtaaggtcagaagctggggtgactgagtacttcgatgagaagaatgaattattccaatgcacaggtacttttgtcatccgacgtgtcattcaacctcaaggccttttggtacctcgatatagcaatactcctggcctggtctacatcattcaaggttcgtataatagtaaatatactagaaaactctatcaatgatactaggagttatgatctccatggtcaaaagactatattttcatgttttatgcactcgatatgaacaatataattttcagggaggggttctatgggtttaaccttccccggttgcccagcgacttatcagcaacaattccaacaattttcgtctcaaggccaaagtcaaagccaaaagtttagggatgagcatcaaaagatccatcaatttagacaaggagatgttgttgcactcccagctggtgttgcacattggttctacaatgatggtgatgcatcggttgttgccatatatgtttatgacataaacaacagtgcaaatcaacttgaaccaaggcaaaaggtaactttttaaacaaatattcccactgaagttgtggttgttttatgtttttaatatgttttcacattaaattcatatttaaaatattaagtttttcattgataaaaatttcaggagttcctattagctggtaacaacaatagggttcaacaagtatatggcagctcaattgagcaacactctagccaaaacatattcaacggattcggtactgagctactaagtgaggctttaggcatcaacacagtagcagcaaagaggctgcagagccaaaatgatcagagaggagagatcgtacatgtgaaaaatggccttcaattgttgaaaccgactttgacacaacaacaagaacaagcacaagctcaataccaagaagttcaatatagtgaacaacaacaaacatcttcccgatggaacggattggaggagaacttctgcacaatcaaggcaagagtaaacattgaaaatcctagtcgtgctgattcatacaacccacgtgctggaaggatttcaagtgtcaacagccagaagttccccatccttaacctcatccaaatgagtgctaccagagtaaacctataccaggtatttattatagcataattttcttcactttattttttgtaaaaaatctgatttacggtttatatgatattatgtctattgatttctacagaatgctattctctcaccattctggaatgtcaatgctcatagtttggtctatatgattcaagggcaatctcgagttcaagtcgttagtaactttggaaagactgtgttcgatggtgtccttcgccctggacaactattgatcattccacaacattatgctgtcttgaagaaagcagagcgtgaaggatgccaatatattgcaatcaagacaaacgctaacgccttcgtcagccaccttgcaggaaaaaactcagtattccgcgccttaccagttgatgtggtcgctaatgcttaccgcatctcacgggagcaagcccgaagcatcaagaacaataggggagaagagcacggtgccttcactcctagatttcaacaacaatactacccaggattctcgaatgagtccgaaagtgagacttcagagtaatgtaactgagaactagttctggcatatagcaaaataaaacaccacaagtatgaatcttggtggtgattctattctatatcaacattaaataaaggtgacatatttcttactttacctacttcaagccatgcgtattccattatggattgttgcggatgtggctatattcacataatttatcctatatatgaggaaacaaattacataccatgttcattccttagacaacatttgaatgccacggagtgagcacatcatggcaacactgaagatttaaatgttgaaagtgctagcattgattgagagggatatacaaaaaaaacttgataaaacttcagaaacaagtaggccaatgtcattaacctcacctaagtaaaatgttgctgcatctgtgtactttgcccccaaaatgaaaaaatggtggatgaagttgtacgcttgaacctttttaaggtacacttacatatatgagttgtttgctctgttgatccaatggttatgacaaaccttgaggttattttgtctttgcatatgatcatttaccattatttggatagattaagatgggcccaattaattcttgaaaggagttgtattaatattatccaatcaaaggaaacatgtttggtcatttcaaaacaaaaaatgacaagtaatgtataggactaagtcatgtgatgcaccagtgttagtatttcttatgccctcacaaataaggtttcgcaagcgcaagaaattacactttacctcggagtatgatggggcatcatatttatcccaaaggatgcactattaattaaaatatatcatctaaggaggataatctactaaccaaacacgagggttagccgataaagataaaggaattatgaactcagataaaaaggactacacctatctagttcaagagatattgatcaaaagctaaatatagtcttcgcaaagcaaaggctatttatacgactaattacttcgagtgcaggagtaattcatcacaaaggatgaacacctttctgccaatgcaccaatgcacaccaatatagatagggttaatttggccacctttgaaggacgaacgggcctgttatcacttgatcgactacgtcctccattttgcttaacatgtctttcttcctaatacaagatctaggcaccacatctacgacttatactaatatttagctcttgagcaaataacacccagacttagctagatgaactaagttgaacaagaaacccgcaaacatatatgaagcacttcaagctaagtagacgatgatcgactagaaggtcgatcagacaatatttcctcatgaaaacgaattggataattaaatgaggaaagtaaatcggcaaatatcgaacatcagtatattgatcaaaatatatgaaatcggaaagatacaggattgttaccgaacttctgaagccgatttctgcagaacttgggtgatttgtaatcctgcatagttttacaaatagatgtagaaaattaattacatatcttagttaaattcagccaaacgtttaccggctagatcaataattattgttaactcgagtaagaaagaataaatggtattaatttcattagaactgaattaaaactaacaaaatgcattaaactaattagaaattgaaatggatatgcctacatacatgcataaaacttggatatatactctctctgtttcacattataacttttttctagtcaaactaccataagtttgatcaagtttataaaaaaaatatagtaacattttttttaaaaaaacatactaccaaaatacattcggtgttgcatttaacgaaactaattcgatgttgtagatgttaatttttctataaagatggtcaaacctaacgaagtttgacttaaaaaagttaaaacgaacttaacaaaatcattttaggaccgcaacacgcacgatgctaatcggtacgcagactagcactattgacaaaaggtaggactagcactgaaggtagccccattaatcaatccaatacagttgttaatagcaatttgtttttaatcaatccaatacctaactgttgcaagcacatatgctacggtgtacgggctacggcccaaggccaaagcctgctgacaacacatgatttgctcatattggagggggcctaatacaatgcaagttgtagctatcaatcacgtgattaattaggcactccctccatttcatactacaaattgctttgatctttataaatcaaacttattaaagtttaatcaaatttatagaaaaataaagcaaacacttacagtattaaattagtttcattacatccaatattttgatagtttgtttgttttgtgttaaaaatattgctatatttttctataaatttaatcaatcctaaaaaagtttaacttagataaaaagtaaaaaacaacttataatatgaaacggaagtattccctccgtttcataatgtaagtcattttagcattttccatattcctatcaatgtcaatgaatctagacatatatatatatatatatcgatttattgatatcaatatgaatgtgggaaatgctagaataacttacattgtgaagtagtagtactgaagtaaattaatacaatgcaagttgtaggtatcgtgtgatcagaattttgaccctttcgatcaaaagcaagttgaaaccaatcagttttcgatataccctctatagaactagagcatttgaatttatttattttttttgaaatctgtccaaattctatcaaatttctcttggtttttgcaaaaatcgttataccactagtgcctaggattaatttcagattccaacggaaagctaaaccttaataacagtatcataatacattataacagtaacataatgcattagtccggaagtactcctgcaaggaaatggaaaaacaaaaggactggtgaagtggcgatgcaagaaatttgaggtattatcaccggcatggtctattcgatcaggactcgatactaggttcactattcaggacaaaaacaacagcaccaaaaaatcaaattttgggaaaatgaaactgagattgcatgagaaccatactggaaagacgcaatgaatgtgcaagaaatattacaatgcgtacggttaataacgagaccatcaaactgttaacagtaagcttgcctcagaatctcataatacaaccatatgagagcaaaggataattgttcctactggtcacctcgctgctgaccagtgcatgctaaatggagggtcaagttccgtacagaccatatcataagccgcagaaaacaatatggaagaacctacaccagtagtctccgcatctccacaaccagaagataactctggattccagccgggatcaaccttatcagtcagaccaattggttgtaacaacagaaaggccaaaagttgtatctcataaattctagaatggttaaaacagtaattttagctccattgtgaaacttacctacacttccaagatgaaatcatctcgccattgtatttttaataaaaaaaaaagggcggggggggggggggggggttgaatagaatagagtaaatgaggtaagcttatcatgtactggcatatttaaacagattttcagtaggaactaacattatccattcagtacgtcaactaagcgaaaatatagctcattaaatcacctgtaatatactctttgtgtttcatggtagaactagccactagtagttaacaagttggaattgatcaaaagaaaatacaagtctcaaggaaagagtcgtctataagagattaggatctatcaagctcatgcacagatgcactcagttttcctaatgtgtacttcaacatctcagtctccctctatttcatctaggagtaactgtctaccttattcagattcatcatttcaaaacatttctctattcaccaattcgtagttacttctgtccatcctaagttcatttctttggcattgtgcaataccaaaacaaaactttgatcactcttttttatcataatatcagaagaattacaacagtaattcatgatggaagtattttacaacgatgagcctagctgtgtcattttgatcatgtgggaaatatgtaatcttaagcgttcgtctgtgataaaagggggaaaatttaatctatactacagattttattggcaccaaataataccacaagattctttcacctttcaaaaataccaggaatttgacagagaaccaatttagtaagcagacaaaattacccttgcatctcacatcctttccctctcttcaacaatatggggcctccaccatatcatccgtgtctctgctccgtccgccatggcatcacgtccgggcaggagaccaccaccagtccagtatgcgtggaggggcatttctgttttgctgctgcggcgttgcgcccgggcaggaccccctgggtcggccatgtggaggcacttttttcctccaccactggtgtttgtgctgccgttttctaatccaccgttgtggcctcgctgcaaagcacaatagccgtggaggggtcttctttgctctgtcgtggcggggtcgcttcgagagcaacagccgccgtggtatccgagcggcctggaggccatgatgagacacccgccaactcgaactgcttcatcagttcacatgcctgagcaaggttctggatgatgagctccactagctggtaccaaatacaacttctgtatcatgctgctgctgcggccacgatggagattggagaactcccaatctagttcacacttcatagggtagctcagtaatcttctcaaacactggtaacggggacaaattagtttgtccaagattgggtaacatccattgaaatctgtatcatttttggaagagacattgctgcaatgtggtattgagtggaggtgcaagaatcttgtggtattatttggtgctggtgaaatctttgtggtatagatgaaattttcccaagaagaaaaaagaaactaattaacctcaagtagactgtcacagcatattttttggaccaggaaaactataccagagtagcagaggctaatgatcaatcacacatgtaactgagaaaagagaaaaatatgctgtagaaatattcaaggaaactgctgaaaacactagaataaattcaaaaaaatacagtcattgcaactgctaagatcagtaatagcatatgattgaagaggcattatcttcgagtactacaccagttggtactttgctagctaggtggtttatgcataataataaatacaaaaaaaaacagaaatataaaatgtcatagccacaaggttgtacaaataaaggtgtgtttgaaatttgaagtcatgttcaggtatttttactccctgcactcacgaatatttgcaatggagtagcagatagttaccaagaaaaaccagtttctatattaaaatattaatgtgaccgataaacccctgacaactagcccatggcccaatctagccacaaatgggtatagaggatttatttgatacggacaaaatagaagatgtgcaatggaaaatgtggggttaaggggattataaactagcatagctggagactgtccatcttcatcatgtccatcaccaatgctcatgcctacaaacgtttaaaagtaaaaaaaaagactcagattcatggagaaaacaattaaatattagggggcaactatgagaatgagatttagtttgaaaatgaaaaaagaacttagtttatttatttatctactatcccgtacagttggactcacaacttgcagcgcgacttttttgccaatgacataacgaactgttgtttcataaaaagaccaaaccaaggtgttattatggttttcagattattagcaagatcagtaaagataaaggtattcagtgaaatggcactatttaagcactaaaatgagccacttgagtacacatttgcatttcggttggcttgaacttgactttcatagagatcaaaataattaagttctatcagtaccaaaaagaaatgctgtactcatattttcaatctgtatatatacttcaactgctacagaaacaacaataacaaaaagaaaaacatcaaaatatattgaagagttcatcaagcagcaaaacaagagagtgatactaccctagtttacattgctactttagcaatcgaggatattcatgcatacatcgacaaaataattagaagtccaaattgctactctagtactcaaggatatgaaaggcaaacatcaaccaactatgaaatgtaaatcatgccattacctgcagtgtaaacacttgcaaatggataaatgaaaagggcagcacagtctttcaaaattctcttgaactccatagactcaagatggaccatgaagagaccattaattgtctttaggaaaatcacattatagtcctcagaaaaccccattacgattggggagcccttgcgctctgttggactcaaggatagaagctcgcccaattgaactgttttctccagcacccatccagactcagagacatcatcatcccaatcattcttcctcctccaaaattgtgagcccaaatccgacatgaagacgaagccgaggccaccatccgctgccggcacgacacaaaatcgtcggtatccatcactcacagccattggcacatcatcaatcacagctagcctctgctcgttcagatcgaactcgaggattccacccggaatccccgaaatcaaccagtagagggaatccccaatccgaacaccgggaacagccagggatatcctagtcaaattgtgtgggaggggtgttgcgatgagatccccccatttgccggtctccgacgagtagatgcaaccgatggcttcgtactgatggcgggtgcccaccagaacgatctggaatcggaatccgccgccgccgccgggaaggcgaaacaccgcgccgttccgcacctcggtctgtccctggtcgcactccggcgggaaggcaacgcggcgctggtcgccggagacggggtcccacacgaggaagcagccgcgcagccgcggcatcactgggttgacggcgaggacgaggccgtcgcggcagccgaggatcctgcagcggaagtcgtcgaaccgcagcgagaagcgcccgccggcgcccacggccgcggggacgcggtcggggggatccatggtggagacgaaggaggggctcacccggtggctgtggaagaagccgaggaggggcgcgccgcggcggtggtgggcgcggaagcggcggaggaaggcggggtcggcggtgacgaggcggcgccagcgcgcgcagacggcggcggcgcgcgggagggaggagggccgcggcgggaggcggagaagta
